(19) United States
(12) Patent Application Publication
(10) Pub. No.: US 2010/0034822 A1
(43) Pub. Date: Feb. 11, 2010

(54) Haemophilus Influenzae Type B

(76) Inventors: Vega Masignani, Siena (IT); Rino Rappuoli, Siena (IT); Herve Tettelin, Ellicott City, MD (US)

Correspondence Address: NOVARTIS VACCINES AND DIAGNOSTICS INC., INTELLECTUAL PROPERTY- X100B, P.O. BOX 8097, Emeryville, CA, 94662-8097, US

(21) Appl. No.: 11/887,712

(22) PCT Filed: Mar. 30, 2006
(86) PCT No.: PCT/US2006/012606

§ 371 Date: May 19, 2009

Related U.S. Application Data
(60) Provisional application No. 60/667,921, filed on Mar. 30, 2005.

(51) Int. Cl. A61K 39/395; C07K 14/00; C07K 16/00; C07H 21/00; A61K 38/16; A61K 31/7052; A61K 39/00; A61P 31/12; A61P 31/04

(52) U.S. Cl. 424/139.1; 530/350; 530/387.9; 536/23.7; 514/12; 514/44 R; 424/184.1

(57) ABSTRACT

Polypeptides comprising various amino acid sequences derived from Haemophilus influenzae type b, including a number of lipoproteins. These can be used in the development of vaccines for preventing and/or treating bacterial meningitis. They may also be useful for diagnostic purposes, and as targets for antibiotics. Antibodies against the polypeptides are also disclosed, as are the coding nucleic acids.

### TECHNICAL FIELD

[0001] This invention is in the field of Haemophilus influenzae immunology and vaccinology.

### BACKGROUND ART

[0002] Haemophilus influenzae is a small, non-motile, Gram-negative coccobacillus. It is a respiratory pathogen that causes a wide spectrum of human infections, including: asymptomatic colonization of the upper respiratory tract (i.e. carriage); infections that extend from colonized mucosal surfaces to cause otitis media (inflammation of the middle ear), bronchitis, conjunctivitis, sinusitis, urinary tract infections and pneumonia; and invasive infections, such as bacteremia, septic arthritis, epiglottitis, pneumonia, empyema, pericarditis, cellulitis, osteomyelitis and meningitis. H.influenzae was the first bacterium for which a complete genome sequence was published [1].

[0003] i H.influenzae strains are either capsulated (typeable) or non-capsulated (non-typeable), and there are six major serological types of capsulated strains (a to f). 95% of H.influenzae-caused invasive diseases are caused by H.influenzae type B (‘Hib’) strains. The most serious manifestation of Hib disease is meningitis, but the introduction in the 1980s of vaccines based on conjugated Hib capsular saccharides has hugely reduced incidence of this disease. Manufacture of the conjugated vaccine involves separate preparation of saccharide and carrier, followed by conjugation, and a simple protein antigen would be more convenient in manufacturing terms.

[0004] The genome sequence of the serotype d strain KW20 [1,2] has been useful for understanding basic H.influenzae biology, but it has not been so useful in countering pathogenic H.influenzae strains, as serotype d strains are generally not pathogens.

[0005] It is an object of the invention to provide polypeptides for use in the development of vaccines for preventing and/or treating infections caused by type b H.influenzae strains. In particular, it is an object to provide polypeptides for use in improved vaccines for preventing and/or treating bacterial meningitis caused by Hib. The polypeptides may also be useful for diagnostic purposes, and as targets for antibiotics.

### DISCLOSURE OF THE INVENTION

### Polypeptides

[0006] The invention provides polypeptides comprising the H.influenzae amino acid sequences disclosed in the examples. These amino acid sequences are the even SEQ ID NOs between 2 and 3706. There are thus 1853 amino acid sequences, and these are referred to as HIBnnnn, where nnnn is a number between 0001 and 1853.

[0007] The invention also provides polypeptides comprising amino acid sequences that have sequence identity to the H.influenzae amino acid sequences disclosed in the examples. Depending on the particular sequence, the degree of sequence identity is preferably greater than 50% (e.g. 60%, 70%, 75%, 80%, 85%, 90%, 91%, 92%, 93%, 94%, 95%, 96%, 97%, 98%, 99% or more). These polypeptides include homologs, orthologs, allelic variamts and functional mutants. Typically, 50% identity or more between two polypeptide sequences is considered to be an indication of functional equivalence. Identity between polypeptides is preferably determined by the Smith-Waterman homology search algorithm as implemented in the MPSRCH program (Oxford Molecular), using an affine gap search with parameters gap open penalty=12 and gap exteiisioi penalty=1.

[0008] These polypeptide may, compared to the Hib sequences of the examples, include one or more (e.g. 1, 2, 3, 4, 5, 6, 7, 8, 9, 10, etc.) conservative amino acid replacements i.e. replacements of one amino acid with another which has a related side chain. Genetically-encoded amino acids are generally divided into four families: (1) acidic i.e. aspartate, glutamate; (2) basic i.e. lysine, argirine, histidine; (3) non-polar i.e. alaiiine, valine, leucine, isoleucine, proline, phenylalanine, methionine, tiyptophan; and (4) uncharged polar i.e. glycine, asparagine, glutamine, cysteine, serine, threonine, tyrosine. Phenylalanine, tryptophan, and tyrosine are sometimes classified jointly as aromatic amino acids. In general, substitution of single amino acids within these families does not have a major effect on the biological activity. The polypeptides may have one or more (e.g. 1, 2, 3, 4, 5, 6, 7, 8, 9, 10, etc.) single amino acid deletions relative to the Hib sequences of the examples. The polypeptides may also include one or more (e.g. 1, 2, 3, 4, 5, 6, 7, 8, 9, 10, etc.) insertions (e.g. each of 1, 2, 3, 4 or 5 amino acids) relative to the Hib sequences of the examples.

[0009] Preferred polypeptides of the invention are listed below, including polypeptides that are lipidated, that are located in the outer membrane, that are located in the inner membrane, or that are located in the periplasm. Particularly preferred polypeptides are those that fall into more than one of these categories e.g. lipidated polypeptides that are located in the outer membrane, such as HIB0374, HIB0382, HIB0426, HIB0733, HIB0734, HIB1564 and HIB1654. Two preferred lipoproteins are HIB1027 and HIB1255. Lipoproteins may have a N-terminal cysteine to which lipid is covalenty attached, following post-translational processing of the signal peptide.

[0010] The invention further provides polypeptides comprising fragments of the H.influenzae amino acid sequences disclosed in the examples. The fragments should comprise at least n consecutive amino acids from the sequences and, depending on the particular sequence, n is 7 or more (e.g. 8, 10, 12, 14, 16, 18, 20, 22, 24, 26, 28, 30, 35, 40, 45, 50, 60, 70, 80, 90, 100 or more).

[0011] The fragment may comprise at least one T-cell or, preferably, a B-cell epitope of the sequence. T- and B-cell epitopes can be identified empirically (e.g. using PEPSCAN [3,4] or similar methods), or they can be predicted (e.g. using the Jameson-Wolf antigenic index [5], matrix-based approaches [6], TEPITOPE [7], neural networks [8], OptiMer & EpiMer [9,10], ADEPT [11], Tsites [12], hydrophilicity [13], antigenic index [14] or the methods disclosed in reference 15, etc.). Other preferred fragments are (a) the N-terminal signal peptides of the Hib polypeptides of the invention, (b) the Hib polypeptides, but without their N-terminal signal peptides, (c) the Hib polypeptides, but without their N-terminal amino acid residue.

[0012] Polypeptides of the invention can be prepared in many ways e.g. by chemical synthesis (in whole or in part), by digesting longer polypeptides using proteases, by translation from RNA, by purification from cell culture (e.g. from recombinant expression), from the organism itself (e.g. after bacterial culture, or direct from patients), etc. A preferred method for production of peptides <40 amino acids long involves in vitro chemical synthesis [16,17]. Solid-phase peptide synthesis is particularly preferred, such as methods based on tBoc or Fmoc [18] chemistry. Enzymatic synthesis [19] may also be used in part or in full. As an alternative to chemical synthesis, biological synthesis may be used e.g. the polypeptides may be produced by translation. This may be carried out in vitro or in vivo. Biological methods are in general restricted to the production of polypeptides based on L-amino acids, but manipulation of translation machinery (e.g. of aminoacyl tRNA molecules) can be used to allow the introduction of D-amino acids (or of other non natural amino acids, such as iodotyrosine or methylphenylalanine, azidohomoalanine, etc.) [20]. Where D-amino acids are included, however, it is preferred to use chemical synthesis. Polypeptides of the invention may have covalent modifications at the C-terminus and/or N-terminus.

[0013] Polypeptides of the invention can take various forms (e.g. native, fusions, glycosylated, non-glycosylated, lipidated, non-lipidated, phosphorylated, non-phosphorylated, myristoylated, non-myristoylated, monomeric, multimeric, particulate, denatured, etc.).

[0014] Polypeptides of the invention are preferably provided in purified or substantially purified form i.e. substantially free from other polypeptides (e.g. free from naturally-occurring polypeptides), particularly from other Haemophilus or host cell polypeptides, and are generally at least about 50% pure (by weight), and usually at least about 90% pure i.e. less than about 50%, and more preferably less than about 10% (e.g. 5%) of a composition, is made up of other expressed polypeptides. Polypeptides of the invention are preferably H.influenzae polypeptides. Polypeptides of the invention preferably have the finction indicated in Table I for the relevant sequence.

[0015] Polypeptides of the invention may be attached to a solid support. Polypeptides of the invention may comprise a detectable label (e.g. a radioactive or fluorescent label, or a biotin label).

[0016] The term “polypeptide” refers to amino acid polymers of any length. The polymer may be linear or branched, it may comprise modified amino acids, and it may be interrupted by non-amino acids. The terms also encompass an amino acid polymer that has been modified naturally or by intervention; for example, disulfide bond formation, glycosylation, lipidation, acetylation, phosphorylation, or any other manipulation or modification, such as conjugation with a labeling component. Also included within the definition are, for example, polypeptides containing one or more analogs of an amino acid (including, for example, unnatural amino acids, etc.), as well as other modifications known in the art. Polypeptides can occur as single chains or associated chains. Polypeptides of the invention can be naturally or non-naturally glycosylated (i.e. the polypeptide has a glycosylation pattern that differs from the glycosylation pattern found in the corresponding naturally occurring polypeptide).

[0017] The invention provides polypeptides comprising a sequence —X—Y— or —Y—X—, wherein: —X— is an amino acid sequence as defined above and —Y— is not a sequence as defined above i.e. the invention provides fusion proteins. Where the N-terminus codon of a polypeptide-coding sequence is not ATG then that codon will be translated as the standard amino acid for that codon rather than as a Met, which occurs when the codon is translated as a start codon.

[0018] The invention provides a process for producing polypeptides of the invention, comprising the step of culturing a host cell of to the invention under conditions which induce polypeptide expression.

[0019] The invention provides a process for producing a polypeptide of the invention, wherein the polypeptide is synthesised in part or in whole using chemical means.

[0020] The invention provides a composition comprising two or more polypeptides of the invention.

[0021] The invention also provides a hybrid polypeptide represented by the formula NH₂-A-[-X-L-]ₙ-B—COOH, wherein X is a polypeptide of the invention as defined above, L is an optional linker amino acid sequence, A is an optional N-terminal amino acid sequence, B is an optional C-terminal amino acid sequence, and n is an integer greater than 1. The value of n is between 2 and x, and the value of x is typically 3, 4, 5, 6, 7, 8, 9 or 10. Preferably n is 2, 3 or 4; it is more preferably 2 or 3; most preferably, n=2. For each n instances, —X— may be the same or different. For each n instances of [—X-L-], linker amino acid sequence -L- may be present or absent. For instance, when n=2 the hybrid may be NH₂—X₁-L₁-X₂-L₂-COOH, NH₂—X₁—X₂—COOH, NH₂—X₁-L₁-X₂—COOH, NH₂—X₁—X₂-L₂-COOH, etc. Linker amino acid sequence(s) -L- will typically be short (e.g. 20 or fewer amino acids i.e. 19, 18, 17, 16, 15, 14, 13, 12, 11, 10, 9, 8, 7, 6, 5, 4, 3, 2, 1). Examples include short peptide sequences which facilitate cloning, poly-glycine linkers (i.e. Glyₙ where n=2, 3, 4, 5, 6, 7, 8, 9, 10 or more), and histidine tags (i.e. Hisₙ where n=3, 4, 5, 6, 7, 8, 9, 10 or more). Other suitable linker amino acid sequences will be apparent to those skilled in the art. -A- and —B— are optional sequences which will typically be short (e.g. 40 or fewer amino acids i.e. 39, 38, 37, 36, 35, 34, 33, 32, 31, 30, 29, 28, 27, 26, 25, 24, 23, 22, 21, 20, 19, 18, 17, 16, 15, 14, 13, 12,11, 10, 9, 8, 7, 6, 5, 4, 3, 2, 1). Examples include leader sequences to direct polypeptide trafficking, or short peptide sequences which facilitate cloning or purification (e.g. histidine tags i.e. Hisₙ where n=3, 4, 5, 6, 7, 8, 9, 10 or more). Other suitable N-terminal and C-terminal amino acid sequences will be apparent to those skilled in the art.

[0022] Various tests can be used to assess the in vivo immunogenicity of polypeptides of the invention. For example, polypeptides can be expressed recombinantly and used to screen patient sera by immunoblot. A positive reaction between the polypeptide and patient serum indicates that the patient has previously mounted an immune response to the protein in question i.e. the protein is an immunogen. This method can also be used to identify immunodominant proteins.

### Antibodies

[0023] The invention provides antibodies that bind to polypeptides of the invention. These may be polyclonal or monoclonal and may be produced by any suitable means (e.g. by recombinant expression). To increase compatibility with the human immune system, the antibodies may be chimeric or humanised [e.g. refs. 21 & 22], or fully human antibodies may be used. The antibodies may include a detectable label (e.g. for diagnostic assays). Antibodies of the invention may be attached to a solid support. Antibodies of the invention are preferably neutralising antibodies.

[0024] Monoclonal antibodies are particularly useful in identification and purification of the individual polypeptides against which they are directed. Monoclonal antibodies of the invention may also be employed as reagents in immunoassays, radioimmunoassays (RIA) or enzyme-linked immunosorbent assays (ELISA), etc. In these applications, the antibodies can be labelled with an analytically-detectable reagent such as a radioisotope, a fluorescent molecule or an enzyme. The monoclonal antibodies produced by the above method may also be used for the molecular identification and characterization (epitope mapping) of polypeptides of the invention.

[0025] Antibodies of the invention are preferably specific to Haemophilus i.e. they bind preferentially to Haemophilus bacteria relative to non-Haemophilus bacteria. More preferably, the antibodies are specific to Hib i.e. they bind preferentially to Hib bacteria relative to non-type-b H.influenzae strains.

[0026] Antibodies of the invention are preferably provided in purified or substantially purified form. Typically, the antibody will be present in a composition that is substantially free of other polypeptides e.g. where less than 90% (by weight), usually less than 60% and more usually less than 50% of the composition is made up of other polypeptides.

[0027] Antibodies of the invention can be of any isotype (e.g. IgA, IgG, IgM i.e. an α, γ or μ heavy chain), but will generally be IgG. Within the IgG isotype, antibodies may be IgG1, IgG2, IgG3 or IgG4 subclass. Antibodies of the invention may have a κ or a λ light chain.

[0028] Antibodies of the invention can take various forms, including whole antibodies, antibody fragments such as F(ab′)₂ and F(ab) fragments, Fv fragments (non-covalent heterodimers), single-chain antibodies such as single chain Fv molecules (scFv), minibodies, oligobodies, etc. The term “antibody” does not imply any particular origin, and includes antibodies obtained through non-conventional processes, such as phage display.

[0029] The invention provides a process for detecting polypeptides of the invention, comprising the steps of:

[0030] (a) contacting an antibody of the invention with a biological sample under conditions suitable for the formation of an antibody-antigen complexes; and (b) detecting said complexes.

[0031] The invention provides a process for detecting antibodies of the invention, comprising the steps of:

[0032] (a) contacting a polypeptide of the invention with a biological sample (e.g. a blood or serum sample) under conditions suitable for the formation of an antibody-antigen complexes; and (b) detecting said complexes.

### Nucleic Acids

[0033] The invention provides nucleic acid comprising the H.influenzae nucleotide sequences disclosed in the examples. These nucleic acid sequences are the odd SEQ ID NOs between 1 and 3706.

[0034] The invention also provides nucleic acid comprising nucleotide sequences having sequence identity to the H.influenzae nucleotide sequences disclosed in the examples. Identity between sequences is preferably determined by the Smith-Waterman homology search algorithm as described above.

[0035] The invention also provides nucleic acid which can hybridize to the H.influenzae nucleic acid disclosed in the examples. Hybridization reactions can be performed under conditions of different “stringency”. Conditions that increase stringency of a hybridization reaction of widely known and published in the art [e.g. page 7.52 of reference 23]. Examples of relevant conditions include (in order of increasing stringency): incubation temperatures of 25° C., 37° C., 50° C., 55° C. and 68° C.; buffer concentrations of 10×SSC, 6×SSC, 1×SSC, 0.1×SSC (where SSC is 0.15 M NaCl and 15 mM citrate buffer) and their equivalents using other buffer systems; formamide concentrations of 0%, 25%, 50%, and 75%; incubation times from 5 minutes to 24 hours; 1, 2, or more washing steps; wash incubation times of 1, 2, or 15 minutes; and wash solutions of 6×SSC, 1×SSC, 0.1×SSC, or de-ionized water. Hybridization techniques and their optimization are well known in the art [e.g. see references 23-26, etc.].

[0036] In some embodiments, nucleic acid of the invention hybridizes to a target of the invention under low stringency conditions; in other embodiments it hybridizes under intermediate stringency conditions; in preferred embodiments, it hybridizes under high stringency conditions. An exemplary set of low stringency hybridization conditions is 50° C. and 10×SSC. An exemplary set of intermediate stringency hybridization conditions is 55° C. and 1×SSC. An exemplary set of high stringency hybridization conditions is 68° C. and 0.1×SSC.

[0037] Nucleic acid comprising fragments of these sequences are also provided. These should comprise at least ?i consecutive nucleotides from the H.influenzae sequences and, depending on the particular sequence, n is 10 or more (e.g. 12, 14, 15, 18, 20, 25, 30, 35, 40, 50, 60, 70, 80, 90, 100, 150, 200 or more).

[0038] The invention provides nucleic acid of formula 5′-X-Y-Z-3′, wherein: —X— is a nucleotide sequence consisting of x nucleotides; -Z- is a nucleotide sequence consisting of z nucleotides; —Y— is a nucleotide sequence consisting of either (a) a fragment of one of the odd-numbered SEQ ID NOS: 1 to 5079, or (b) the complement of (a); and said nucleic acid 5′-X-Y-Z-3′ is neither (i) a fragment of one of the odd-numbered SEQ ID NOS: 1 to 3705 nor (ii) the complement of (i). The —X— and/or —Z— moieties may comprise a promoter sequence (or its complement).

[0039] The invention also provides nucleic acid encoding the polypeptides and polypeptide fragments of the invention.

[0040] The invention includes nucleic acid comprising sequences complementary to the sequences disclosed in the sequence listing (e.g. for antisense or probing, or for use as primers), as well as the sequences in the orientation actually shown.

[0041] Nucleic acids of the invention can be used in hybridisation reactions (e.g. Northern or Southern blots, or in nucleic acid microarrays or ‘gene chips’) and amplification reactions (e.g. PCR, SDA, SSSR, LCR, TMA, NASBA, etc.) and other nucleic acid techniques.

[0042] Nucleic acid according to the invention can take various forms (e.g. single-stranded, double-stranded, vectors, primers, probes, labelled etc.). Nucleic acids of the invention may be circular or branched, but will generally be linear. Unless otherwise specified or required, any embodiment of the invention that utilizes a nucleic acid may utilize both the double-stranded form and each of two complementary single-stranded forms which make up the double-stranded form. Primers and probes are generally single-stranded, as are antisense nucleic acids.

[0043] Nucleic acids of the invention are preferably provided in purified or substantially purified form i.e. substantially free from other nucleic acids (e.g. free from naturally-occurring nucleic acids), particularly from other Haemophilus or host cell nucleic acids, generally being at least about 50% pure (by weight), and usually at least about 90% pure. Nucleic acids of the invention are preferably H.influenzae nucleic acids.

[0044] Nucleic acids of the invention may be prepared in many ways e.g. by chemical synthesis (e.g. phosphoramidite synthesis of DNA) in whole or in part, by digesting longer nucleic acids using nucleases (e.g. restriction enzymes), by joining shorter nucleic acids or nucleotides (e.g. using ligases or polymerases), from genomic or cDNA libraries, etc.

[0045] Nucleic acid of the invention may be attached to a solid support (e.g. a bead, plate, filter, film, slide, microarray support, resin, etc.). Nucleic acid of the invention may be labelled e.g. with a radioactive or fluorescent label, or a biotin label. This is particularly useful where the nucleic acid is to be used in detection techniques e.g. where the nucleic acid is a primer or as a probe.

[0046] The term “nucleic acid” includes in general means a polymeric form of nucleotides of any length, which contain deoxyribonucleotides, ribonucleotides, and/or their analogs. It includes DNA, RNA, DNA/RNA hybrids. It also includes DNA or RNA analogs, such as those containing modified backbones (e.g. peptide nucleic acids (PNAs) or phosphorothioates) or modified bases. Thus the invention includes mRNA, tRNA, rRNA, ribozymes, DNA, cDNA, recombinant nucleic acids, branched nucleic acids, plasmids, vectors, probes, primers, etc. Where nucleic acid of the invention takes the form of RNA, it may or may not have a 5′ cap.

[0047] Nucleic acids of the invention comprise Hib sequences, but they may also comprise non-Hib sequences (e.g. in nucleic acids of formula 5′-X-Y-Z-3′, as defined above). This is particularly useful for primers, which may thus comprise a first sequence complementary to a Hib nucleic acid target and a second sequence which is not complementary to the nucleic acid target. Any such non-complementary sequences in the primer are preferably 5′ to the complementary sequences. Typical non-complementary sequences comprise restriction sites or promoter sequences.

[0048] Nucleic acids of the invention can be prepared in many ways e.g. by chemical synthesis (at least in part), by digesting longer nucleic acids using nucleases (e.g. restriction enzymes), by joining shorter nucleic acids (e.g. using ligases or polymerases), from genomic or cDNA libraries, etc.

[0049] Nucleic acids of the invention may be part of a vector i.e. part of a nucleic acid construct designed for transduction/transfection of one or more cell types. Vectors may be, for example, “cloning vectors” which are designed for isolation, propagation and replication of inserted nucleotides, “expression vectors” which are designed for expression of a nucleotide sequence in a host cell, “viral vectors” which is designed to result in the production of a recombinant virus or virus-like particle, or “shuttle vectors”, which comprise the attributes of more than one type of vector. Preferred vectors are plasmids. A “host cell” includes an individual cell or cell culture which can be or has been a recipient of exogenous nucleic acid. Host cells include progeny of a single host cell, and the progeny may not necessarily be completely identical (in morphology or in total DNA complement) to the original parent cell due to natural, accidental, or deliberate mutation and/or change. Host cells include cells transfected or infected in vivo or in vitro with nucleic acid of the invention.

[0050] Where a nucleic acid is DNA, it will be appreciated that “U′ in a RNA sequence will be replaced by “T” in the DNA. Similarly, where a nucleic acid is RNA, it will be appreciated that “T” in a DNA sequence will be replaced by “U” in the RNA.

[0051] The term “complement” or “complementary” when used in relation to nucleic acids refers to Watson-Crick base pairing. Thus the complement of C is G, the complement of G is C, the complement of A is T (or U), and the complement of T (or U) is A. It is also possible to use bases such as I (the purine inosine) e.g. to complement pyrimidines (C or T). The terms also imply a direction—the complement of 5′-ACAGT-3′ is 5′-ACTGT-3′ rather than 5′-TGTCA-3′.

[0052] Nucleic acids of the invention can be used, for example: to produce polypeptides; as hybridization probes for the detection of nucleic acid in biological samples; to generate additional copies of the nucleic acids; to generate ribozymes or antisense oligonucleotides; as single-stranded DNA primers or probes; or as triple-strand forming oligonucleotides.

[0053] The invention provides a process for producing nucleic acid of the invention, wherein the nucleic acid is synthesised in part or in whole using chemical means.

[0054] The invention provides vectors comprising nucleotide sequences of the invention (e.g. cloning or expression vectors) and host cells transformed with such vectors.

[0055] The invention also provides a kit comprising primers (e.g. PCR primers) for amplifying a template sequence contained within a Haemophilus bacterium (e.g. H.influenzae) nucleic acid sequence, the kit comprising a first primer and a second primer, wherein the first primer is substantially complementary to said template sequence and the second primer is substantially complementary to a complement of said template sequence, wherein the palls of said primers which have substantial complementarity define the termini of the template sequence to be amplified. The first primer and/or the second primer may include a detectable label (e.g. a fluorescent label).

[0056] The invention also provides a kit comprising first and second single-stranded oligonucleotides which allow amplification of a Haemophilus template nucleic acid sequence contained in a single- or double-stranded nucleic acid (or mixture thereof), wherein: (a) the first oligonucleotide comprises a primer sequence which is substantially complementary to said template nucleic acid sequence; (b) the second oligonucleotide comprises a primer sequence which is substantially complementary to the complement of said template nucleic acid sequence; (c) the first oligonucleotide and/or the second oligonucleotide comprise(s) sequence which is not compementary to said template nucleic acid; and (d) said primer sequences define the termini of the template sequence to be amplified. The non-complementary sequence(s) of feature (c) are preferably upstream of (i.e. 5′ to) the primer sequences. One or both of these (c) sequences may comprise a restriction site [e.g. ref 27] or a promoter sequence [e.g. 28]. The first oligonucleotide and/or the second oligonucleotide may include a detectable label (e.g. a fluorescent label).

[0057] The template sequence may be any part of a genome sequence e.g. of SEQ ID NO:3707.

[0058] The invention provides a process for detecting nucleic acid of the invention, comprising the steps of: (a) contacting a nucleic probe according to the invention with a biological sample under hybridising conditions to form duplexes; and (b) detecting said duplexes.

[0059] The invention provides a process for detecting H.influenzae in a biological sample (e.g. blood), comprising the step of contacting nucleic acid according to the invention with the biological sample under hybridising conditions. The process may involve nucleic acid amplification (e.g. PCR, SDA, SSSR, LCR, TMA, NASBA, etc.) or hybridisation (e.g microarrays, blots, hybridisation with a probe in solution etc.). PCR detection of H.influenzae in clinical samples has been reported [e.g. see refs. 29 & 30]. Clinical assays based on nucleic acid are described in general in ref. 31.

[0060] The invention provides a process for preparing a fragment of a target sequence, wherein the fragment is prepared by extension of a nucleic acid primer. The target sequence and/or the primer are nucleic acids of the invention. The primer extension reaction may involve nucleic acid amplification (e.g. PCR, SDA, SSSR, LCR, TMA, NASBA, etc.).

[0061] Nucleic acid amplification according to the invention may be quantitative and/or real-time.

[0062] For certain embodiments of the invention, nucleic acids are preferably at least 7 nucleotides in length (e.g. 8, 9, 10, 11, 12, 13, 14, 15, 16, 17, 18, 19, 20, 21, 22, 23, 24, 25, 26, 27, 28, 29, 30, 31, 32, 33, 34, 35, 36, 37, 38, 39, 40, 45, 50, 55, 60, 65, 70, 75, 80, 90, 100, 110, 120, 130, 140, 150, 160, 170, 180, 190, 200, 225, 250, 275, 300 nucleotides or longer).

[0063] For certain embodiments of the invention, nucleic acids are preferably at most 500 nucleotides in length (e.g. 450, 400, 350, 300, 250, 200, 150, 140, 130, 120, 110, 100, 90, 80, 75, 70, 65, 60, 55, 50, 45, 40, 39, 38, 37,36, 35, 34, 33, 32, 31, 30, 29, 28, 27, 26, 25, 24, 23, 22, 21, 20, 19, 18, 17, 16, 15 nucleotides or shorter).

[0064] Primers and probes of the invention, and other nucleic acids used for hybridization, are preferably between 10 and 30 nucleotides in length (e.g. 10, 11, 12, 13, 14, 15, 16, 17, 18, 19, 20, 21, 22, 23, 24, 25, 26, 27, 28, 29, or 30 nucleotides).

### Pharmaceutical Compositions

[0065] The invention provides compositions comprising: (a) polypeptide, antibody, and/or nucleic acid of the invention; and (b) a pharmaceutically acceptable carrier. These compositions may be suitable as immunogenic compositions, for instance, or as diagnostic reagents, or as vaccines. Vaccines according to the invention may either be prophylactic (i.e. to prevent infection) or therapeutic (i.e. to treat infection), but will typically be prophylactic.

[0066] A ‘pharmaceutically acceptable carriers’ includes any carrier that does not itself induce the production of antibodies harmful to the individual receiving the composition. Suitable carriers are typically large, slowly metabolised macromolecules such as proteins, polysaccharides, polylactic acids, polyglycolic acids, polymeric amino acids, amino acid copolymers, sucrose, trehalose, lactose, and lipid aggregates (such as oil droplets or liposomes). Such carriers are well known to those of ordinary skill in the art. The vaccines may also contain diluents, such as water, saline, glycerol, etc. Additionally, auxiliary substances, such as wetting or emulsifying agents, pH buffering substances, and the like, may be present. Sterile pyrogen-free, phosphate-buffered physiologic saline is a typical carrier. A thorough discussion of pharmaceutically acceptable excipients is available in ref 142.

[0067] Compositions of the invention may include an antimicrobial, particularly if packaged in a multiple dose format.

[0068] Compositions of the invention may comprise detergent e.g. a Tween (polysorbate), such as Tween 80. Detergents are generally present at low levels e.g. <0.01%.

[0069] Compositions of the invention may include sodium salts (e.g. sodium chloride) to give tonicity. A concentration of 10±2 mg/ml NaCl is typical.

[0070] Compositions of the invention will generally include a buffer. A phosphate buffer is typical.

[0071] Compositions of the invention may comprise a sugar alcohol (e.g. mannitol) or a disaccharide (e.g. sucrose or trehalose) e.g. at around 15-30mg/ml (e.g. 25 mg/ml), particularly if they are to be lyophilised or if they include material which has been reconstituted from lyophilised material. The pH of a composition for lyophilisation may be adjusted to around 6.1 prior to lyophilisation.

[0072] Polypeptides of the invention may be administered in conjunction with other immunoregulatory agents. In particular, compositions will usually include a vaccine adjuvant. Adjuvants which may be used in compositions of the invention include, but are not limited to:

### A. Mineral-containing Compositions

[0073] Mineral containing compositions suitable for use as adjuvants in the invention include mineral salts, such as aluminum salts and calcium salts. The invention includes mineral salts such as hydroxides (e.g. oxyhydroxides), phosphates (e.g. hydroxyphosphates, orthophosphates), sulphates, etc. [e.g. see chapters 8 & 9 of ref. 32), or mixtures of different mineral compounds, with the compounds taking any suitable form (e.g. gel, crystalline, amorphous, etc.), and with adsorption being preferred. The mineral containing compositions may also be formulated as a particle of metal salt [33].

[0074] Aluminium phosphates are particularly preferred, particularly in compositions which include a H.influenzae saccharide antigen, and a typical adjuvant is amorphous aluminium hydroxyphosphate with PO₄/Al molar ratio between 0.84 and 0.92, included at 0.6 mg Al³⁺/ml. Adsorption with a low dose of aluminium phosphate may be used e.g. between 50 and 100 μg Al³⁺ per conjugate per dose. Where there is more than one conjugate in a composition, not all conjugates need to be adsorbed.

### B. Oil Emulsions

[0075] Oil emulsion compositions suitable for use as adjuvants in the invention include squalene-water emulsions, such as MF59 [Chapter 10 of ref. 32; see also ref. 34] (5% Squalene, 0.5% Tween 80, 0.5% Span 85, formulated into submicron particles using a nicrofluidizer). Complete Freund's adjuvant (CFA) and incomplete Freund's adjuvant (IFA) may also be used.

### C. Saponion Formulations [Chapter 22 of Ref. 32]

[0076] Saponin formulations may also be used as adjuvants in the invention. Saponins are a heterologous group of sterol glycosides and triterpenoid glycosides that are found in the bark, leaves, stems, roots and even flowers of a wide range of plant species. Saponin from the bark of the Quillaia saponaria Molina tree have been widely studied as adjuvants. Saponin can also be commercially obtained from Smilax ornata (sarsaprilla), Gypsophilla paniculata (brides veil), and Saponaria officianalis (soap root). Saponin adjuvant formulations include purified formulations, such as QS21, as well as lipid formulations, such as ISCOMs. QS21 is marketed as Stimulon™.

[0077] Saponin compositions have been purified using HPLC and RP-HPLC. Specific purified fractions using these techniques have been identified, including QS7, QS17, QS18, QS21, QH-A, QH-B and QH-C. Preferably, the saponin is QS21. A method of production of QS21 is disclosed in ref. 35. Saponin formulations may also comprise a sterol, such as cholesterol [36].

[0078] Combinations of saponins and cholesterols can be used to form unique particles called immunostimulating complexs (ISCOMs) [chapter 23 of ref. 32]. ISCOMs typically also include a phospholipid such as phosphatidylethanolamine or phosphatidylcholine. Any known saponin can be used in ISCOMs. Preferably, the ISCOM includes one or more of QuilA, QHA & QHC. ISCOMs are further described in refs. 36-38. Optionally, the ISCOMS may be devoid of additional detergent [39].

[0079] A review of the development of saponin based adjuvants can be found in refs. 40 & 41.

### D. Virosomes and Virus-Like Particles

[0080] Virosomes and virus-like particles (VLPs) can also be used as adjuvants in the invention. These structures generally contain one or more proteins from a virus optionally combined or formulated with a phospholipid. They are generally non-pathogenic, non-replicating and generally do not contain any of the native viral genome. The viral proteins may be recombinantly produced or isolated from whole viruses. These viral proteins suitable for use in virosomes or VLPs include proteins derived from influenza virus (such as HA or NA), Hepatitis B virus (such as core or capsid proteins), Hepatitis E virus, measles virus, Sindbis virus, Rotavirus, Foot-and-Mouth Disease virus, Retrovirus, Norwalk virus, human Papilloma virus, HIV, RNA-phages, Qβ-phage (such as coat proteins), GA-phage, fr-phage, AP205 phage, and Ty (such as retrotransposon Ty protein p1). VLPs are discussed further in refs. 42-47. Virosomes are discussed further in, for example, ref. 48

### E. Bacterial or Microbial Derivatives

[0081] Adjuvants suitable for use in the invention include bacterial or microbial derivatives such as non-toxic derivatives of enterobacterial lipopolysaccharide (LPS), Lipid A derivatives, immunostimulatory oligonucleotides and ADP-ribosylating toxins and detoxified derivatives thereof.

[0082] Non-toxic derivatives of LPS include monophosphoryl lipid A (MPL) and 3-O-deacylated MPL (3dMPL). 3dMPL is a mixture of 3 de-O-acylated monophosphoryl lipid A with 4, 5 or 6 acylated chains. A preferred “small particle” form of 3 De-O-acylated monophosphoryl lipid A is disclosed in ref. 49. Such “small particles” of 3dMPL are small enough to be sterile filtered through a 0.22 μm membrane [49]. Other non-toxic LPS derivatives include monophosphoryl lipid A mimics, such as aminoalkyl glucosaminide phosphate derivatives e.g. RC-529 [50,51].

[0083] Lipid A derivatives include derivatives of lipid A from Escherichia coli such as OM-174. OM-174 is described for example in refs. 52 & 53.

[0084] Immunostimulatory oligonucleotides suitable for use as adjuvants in the invention include nucleotide sequences containing a CpG motif (a dinucleotide sequence containing an unmethylated cytosine linked by a phosphate bond to a guanosine). Double-stranded RNAs and oligonucleotides containing palindromic or poly(dG) sequences have also been shown to be immunostimulatory.

[0085] The CpG's can include nucleotide modifications/analogs such as phosphorothioate modifications and can be double-stranded or single-stranded. References 54, 55 and 56 disclose possible analog substitutions e.g. replacement of guanosine with 2′-deoxy-7-deazaguanosine. The adjuvant effect of CpG oligonucleotides is further discussed in refs. 57-62.

[0086] The CpG sequence may be directed to TLR9, such as the motif GTCGTT or TTCGTT [63]. The CpG sequence may be specific for inducing a Th1 immune response, such as a CpG-A ODN, or it may be more specific for inducing a B cell response, such a CpG-B ODN. CpG-A and CpG-B ODNs are discussed in refs. 64-66. Preferably, the CpG is a CpG-A ODN.

[0087] Preferably, the CpG oligonucleotide is constructed so that the 5′ end is accessible for receptor recognition. Optionally, two CpG oligonucleotide sequences may be attached at their 3′ ends to form “immunomers”. See, for example, refs. 63 & 67-69.

[0088] Bacterial ADP-ribosylating toxins and detoxified derivatives thereof may be used as adjuvants in the invention. Preferably, the protein is derived from E.coli (E.coli heat labile enterotoxin “LT”), cholera (“CT”), or pertussis (“PT”). The use of detoxified ADP-ribosylating toxins as mucosal adjuvants is described in ref. 70 and as parenteral adjuvants in ref. 71. The toxin or toxoid is preferably in the form of a holotoxin, comprising both A and B subunits. Preferably, the A subunit contains a detoxifying mutation; preferably the B subunit is not mutated. Preferably, the adjuvant is a detoxified LT mutant such as LT-K63, LT-R72, and LT-G192. The use of ADP-ribosylating toxins and detoxified derivaties thereof, particularly LT-K(63 and LT-R72, as adjuvants can be found in refs. 72-79. Numerical reference for amino acid substitutions is preferably based on the alignments of the A and B subunits of ADP-ribosylating toxins set forth in ref. 80, specifically incorporated herein by reference in its entirety.

### F. Human Immunomodulators

[0089] Human immunomodulators suitable for use as adjuvants in the invention include cytokines, such as interleukins (e.g. IL-1, IL-2, IL-4, IL-5, IL-6, IL-7, IL-12 [81], etc.) [82], interferons (e.g. interferon-γ), macrophage colony stimulating factor, and tumor necrosis factor.

### G. Bioadhesives and Mucoadhesives

[0090] Bioadhesives and mucoadhesives may also be used as adjuvants in the invention. Suitable bioadhesives include esterified hyaluronic acid microspheres [83] or mucoadhesives such as cross-linked derivatives of poly(acrylic acid), polyvinyl alcohol, polyvinyl pyrollidone, polysaccharides and carboxymethylcellulose. Chitosan and derivatives thereof may also be used as adjuvants in the invention [84].

### H. Microparticles

[0091] Microparticles may also be used as adjuvants in the invention. Microparticles (i.e. a particle of ˜100 nm to ˜150 μm in diameter, more preferably ˜200 nm to ˜301 μm in diameter, and most preferably ˜500 nm to ˜10 μm in diameter) formed from materials that are biodegradable and non-toxic (e.g. a poly(α-hydroxy acid), a polyhydroxybutyric acid, a polyorthoester, a polyanhydride, a polycaprolactone, etc.), with poly(lactide-co-glycolide) are preferred, optionally treated to have a negatively-charged surface (e.g. with SDS) or a positively-charged surface (e.g. with a cationic detergent, such as CTAB).

### I. Liposomes (Chapters 13 & 14 of Ref. 32)

[0092] Examples of liposome formulations suitable for use as adjuvants are described in refs. 85-87.

### J. Polyoxyethlylene Ether and Polyoxyethylene Ester Formulations

[0093] Adjuvants suitable for use in the invention include polyoxyethylene ethers and polyoxyethylene esters [88]. Such formulations further include polyoxyethylene sorbitan ester surfactants in combination with an octoxynol [89] as well as polyoxyethylene alkyl ethers or ester surfactants in combination with at least one additional non-ionic surfactant such as an octoxynol [90]. Preferred polyoxyethylene ethers are selected from the following group: polyoxyethylene-9-lauryl ether (laureth 9), polyoxyethylene-9-steoryl ether, polyoxytheylene-8-steoryl ether, polyoxyethylene-4-lauryl ether, polyoxyethylene-35-lauryl ether, and polyoxyethylene-23-lauryl ether.

### K. Polyphosphazene (PCPP)

[0094] PCPP formulations are described, for example, in refs. 91 and 92.

### L. Muramyl Peptides

[0095] Examples of muramyl peptides suitable for use as adjuvants in the invention include N-acetyl-muramyl-L-threonyl-D-isoglutamine (thr-MDP), N-acetyl-normuramyl-L-alanyl-D-isoglutamine (nor-MDP), and N-acetylmuramyl-L-alanyl-D-isoglutaminyl-L-alanine-2-(1′-2′-dipalmitoyl-sn-glycero-3-hydroxyphosphoryloxy)-ethylamine MTP-PE).

### M. Imidazoqunolone Compounds.

[0096] Examples of imidazoquinolone compounds suitable for use adjuvants in the invention include Imiquamod and its homologues (e,g. “Resiquimod 3M”), described further in refs. 93 and 94.

[0097] The invention may also comprise combinations of aspects of one or more of the adjuvants identified above. For example, the following adjuvant compositions may be used in the invention: (1) a saponin and an oil-in-water emulsion [95]; (2) a saponin (e.g. QS21)+a non-toxic LPS derivative (e.g. 3dMPL) [96]; (3) a saponin (e.g. QS21)+a non-toxic LPS derivative (e.g. 3dMPL)+a cholesterol; (4) a saponin (e.g. QS21)+3dMPL+IL-12 (optionally+a sterol) [97]; (5) combinations of 3dMPL with, for example, QS21 and/or oil-in-water emulsions [98]; (6) SAF, containing 10% squalane, 0.4% Tween 80™, 5% pluronic-block polymer L121, and thr-MDP, either microfluidized into a submicron emulsion or vortexed to generate a larger particle size emulsion. (7) Ribi™ adjuvant system (RAS), (Ribi Immunochem) containing 2% squalene, 0.2% Tween 80, and one or more bacterial cell wall components fiom the group consisting of monophosphorylipid A (MPL), trehalose dimycolate (TDM), and cell wall skeleton (CWS), preferably MPL+CWS (Detox™); and (8) one or more mineral salts (such as an aluminum salt)+a non-toxic derivative of LPS (such as 3dMPL).

[0098] Other substances that act as immunostimulating agents are disclosed in chapter 7 of ref. 32.

[0099] The use of an aluminium hydroxide or aluminium phosphate adjuvant is particularly preferred, and antigens are generally adsorbed to these salts. Calcium phosphate is another preferred adjuvant.

[0100] The pH of compositions of the invention is preferably between 6 and 8, preferably about 7. Stable pH may be maintained by the use of a buffer. Where a composition comprises an aluinimum hydroxide salt, it is preferred to use a histidine buffer [99]. The composition may be sterile and/or pyrogen-free. Compositions of the invention may be isotonic with respect to humans.

[0101] Compositions may be presented in vials, or they may be presented in ready-filled syringes. The syringes may be supplied with or without needles. A syringe will include a single dose of the composition, whereas a vial may include a single dose or multiple doses. Injectable compositions will usually be liquid solutions or suspensions. Alternatively, they may be presented in solid form (e.g. freeze-dried) for solution or suspension in liquid vehicles prior to injection.

[0102] Compositions of the invention may be packaged in unit dose form or in multiple dose form. For multiple dose forms, vials are preferred to pre-filled syringes. Effective dosage volumes can be routinely established, but a typical human dose of the composition for injection has a volume of 0.5 ml.

[0103] Where a composition of the invention is to be prepared extemporaneously prior to use (e.g. where a component is presented in lyophilised form) and is presented as a kit, the kit may comprise two vials, or it may comprise one ready-filled syringe and one vial, with the contents of the syringe being used to reactivate the contents of the vial prior to injection.

[0104] Immunogenic compositions used as vaccines comprise an immunologically effective amount of antigen(s), as well as any other components, as needed. By ‘immunologically effective amount’, it is meant that the administration of that amount to an individual, either in a single dose or as part of a series, is effective for treatment or prevention. This amount varies depending upon the health and physical condition of the individual to be treated, age, the taxonomic group of individual to be treated (e.g. non-human primate, primate, etc.), the capacity of the individual's immune system to synthesise antibodies, the degree of protection desired, the formulation of the vaccine, the treating doctor's assessment of the medical situation, and other relevant factors. It is expected that the amount will fall in a relatively broad range that can be determined through routine trials, and a typical quantity of each meningococcal saccharide antigen per dose is between 1 μg and 10 mg per antigen.

### Pharmaceutical Uses

[0105] The invention also provides a method of treating a patient, comprising administering to the patient a therapeutically effective amount of a composition of the invention. The patient may either be at risk from the disease themselves or may be a pregnant woman (‘maternal immunisation’).

[0106] The invention provides nucleic acid, polypeptide, or antibody of the invention for use as medicaments (e.g. as immunogenic compositions or as vaccines) or as diagnostic reagents. It also provides the use of nucleic acid, polypeptide, or antibody of the invention in the manufacture of: (i) a medicament for treating or preventing disease and/or infection caused by H.influenzae; (ii) a diagnostic reagent for detecting the presence of H.influenzae or of antibodies raised against H.influenzae; and/or (iii) a reagent which can raise antibodies against H.influenzae. Said H.influenzae serotype or strain, but is preferably type b H.influenzae. Said disease may be, for instance, otitis media, bronchitis, conjunctivitis, sinusitis, a urinary tract infection, pneumonia, bacteremia, septic arthritis, epiglottitis, pneumonia, empyema, pericarditis, cellulitis, osteomyelitis or meningitis. The invention is particularly useful for preventing bacterial meningitis caused by Hib.

[0107] The patient is preferably a human. Where the vaccine is for prophylactic use, the human is preferably a child (e.g. a toddler or infant); where the vaccine is for therapeutic use, the human is preferably an adult. A vaccine intended for children may also be administered to adults e.g. to assess safety, dosage, immunogenicity, etc.

[0108] One way of checking efficacy of therapeutic treatment involves monitoring Hib infection after administration of the composition of the invention. One way of checking efficacy of prophylactic treatment involves monitoring immune responses against an administered polypeptide after administration. Immunogenicity of compositions of the invention can be determined by administering them to test subjects (e.g. children 12-16 months age, or animal models [e.g. a chinchilla model [Error! Bookmark not defined.]) and then determining standard parameters including ELISA titres (GMT) of IgG. These immune responses will generally be determined around 4 weeks after administration of the composition, and compared to values determined before administration of the composition. Where more than one dose of the composition is administered, more than one post-administration determination may be made.

[0109] Administration of polypeptide antigens is a preferred method of treatment for inducing immunity. Administration of antibodies of the invention is another preferred method of treatment. This method of passive immunisation is particularly useful for newborn children or for pregnant women. This method will typically use monoclonal antibodies, which will be humanised or fully human.

[0110] Compositions of the invention will generally be administered directly to a patient. Direct delivery may be accomplished by parenteral injection (e.g. subcutaneously, intraperitoneally, intravenously, intramuscularly, or to the interstitial space of a tissue), or by rectal, oral, vaginal, topical, transdermal, intranasal, sublingual, ocular, aural, pulmonary or other mucosal administration. Intramuscular administration to the thigh or the upper arm is preferred. Injection may be via a needle (e.g. a hypodermic needle), but needle-free injection may alternatively be used. A typical intramuscular dose is 0.5 ml.

[0111] The invention may be used to elicit systemic and/or mucosal immunity.

[0112] Dosage treatment can be a single dose schedule or a multiple dose schedule. Multiple doses may be used in a primary immunisation schedule and/or in a booster immunisation schedule. A primary dose schedule may be followed by a booster dose schedule. Suitable timing between priming doses (e.g. between 4-16 weeks), and between priming and boosting, can be routinely determined.

[0113] Bacterial infections affect various areas of the body and so compositions may be prepared in various forms. For example, the compositions may be prepared as injectables, either as liquid solutions or suspensions. Solid forms suitable for solution in, or suspension in, liquid vehicles prior to injection can also be prepared (e.g. a lyophilised composition). The composition may be prepared for topical administration e.g. as an ointment, cream or powder. The composition be prepared for oral administration e.g. as a tablet or capsule, or as a syrup (optionally flavoured). The composition may be prepared for pulmonary administration e.g. as an inhaler, using a fine powder or a spray. The composition may be prepared as a suppository or pessary. The composition may be prepared for nasal, aural or ocular administration e.g. as spray, drops, gel or powder [e.g. refs 100 & 101].

### Further Antigenic Components of Compositions of the Invention

[0114] The invention also provides a composition comprising a polypeptide or the invention and one or more of the following further antigens:
[0115] a saccharide antigen from N.meningitidis serogroup A, C, W135 and/or Y (preferably all four), such as the oligosaccharide disclosed in ref. 102 from serogroup C [see also ref. 103] or the oligosaccharides of ref. 104.
[0116] a saccharide antigen from Streptococcus Pneumoniae [e.g. 105, 106, 107].
[0117] an antigen from hepatitis A virus, such as inactivated virus [e.g. 108, 109].
[0118] an antigen from hepatitis B virus, such as the surface and/or core antigens [e.g. 109, 110].
[0119] a diphtheria antigen, such as a diphtheria toxoid [e.g. chapter 3 of ref. 111] e.g. the CRM₁₉₇ mutant [e.g. 112].
[0120] a tetanus antigen, such as a tetanus toxoid [e.g. chapter 4 of ref 111].
[0121] an antigen from Bordetella pertussis, such as pertussis holotoxin (PT) and filamentous haemagglutinin (FHA) from B.pertussis, optionally also in combination with pertactin and/or agglutinogens 2 and 3 [e.g. refs. 113 & 114].
[0122] a saccharide antigen from Haemophilus influenzae B [e.g. 103].
[0123] polio antigen(s) [e.g. 115, 116] such as IPV.
[0124] measles, mumps and/or rubella antigens [e.g. chapters 9, 10 & 11 of ref 111].
[0125] influenza antigen(s) [e.g. chapter 19 of ref. 111], such as the haemagglutinin and/or neuraminidase surface proteins.
[0126] an antigen from Moraxella catarrhalis [e.g. 117].
[0127] an protein antigen from Streptococcus agalactiae (group B streptococcus) [e.g. 118, 119].
[0128] a saccharide antigen from Streptococcus agalactiae (group B streptococcus).
[0129] an antigen from Streptococcus pyogenes (group A streptococcus) [e.g. 119, 120, 121].
[0130] an antigen from Staphylococcus aureus [e.g. 122].

[0131] The composition may comprise one or more of these further antigens.

[0132] Toxic protein antigens may be detoxified where necessary (e.g. detoxification of pertussis toxin by chemical and/or genetic means [114]).

[0133] Where a diphtheria antigen is included in the composition it is preferred also to include tetanus antigen and pertussis antigens. Similarly, where a tetanus antigen is included it is preferred also to include diphtheria and pertussis antigens. Similarly, where a pertussis antigen is included it is preferred also to include diphtheria and tetanus antigens. DTP combinations are thus preferred.

[0134] Saccharide antigens are preferably in the form of conjugates. Carrier proteins for the conjugates include bacterial toxins (such as diphtheria toxoid or tetanus toxoid), the N.meningitidis outer membrane protein [123], synthetic peptides [124,125], heat shock proteins [126,127], pertussis proteins [128,129], protein D from H.influenzae [130,131], cytokines [132], lymphokines [132], H.influenzae proteins, hormones [132], growth factors [132], toxin A or B from C.difficile [133], iron-uptake proteins [134], artificial proteins comprising multiple human CD4+T cell epitopes from various pathogen-derived antigens [135] such as the N19 protein [136], pneumococcal surface protein PspA [137], pneumolysin [138], etc. A preferred carrier protein is the CRM197 protein [139].

[0135] Antigens in the composition will typically be present at a concentration of at least 1 μg/ml each. In general, the concentration of any given antigen will be sufficient to elicit an immune response against that antigen.

[0136] As an alternative to using proteins antigens in the immunogenic compositions of the invention, nucleic acid (preferably DNA e.g. in the form of a plasmid) encoding the antigen may be used.

[0137] Antigens are preferably adsorbed to an aluminium salt.

### Screening Methods

[0138] The invention provides a process for determining whether a test compound binds to a polypeptide of the invention. If a test compound binds to a polypeptide of the invention and this binding inhibits the life cycle of the H.influenzae bacterium, then the test compound can be used as an antibiotic or as a lead compound for the design of antibiotics. The process will typically comprise the steps of contacting a test compound with a polypeptide of the invention, and determining whether the test compound binds to said polypeptide. Preferred polypeptides of the invention for use in these processes are enzymes (e.g. tRNA synthetases), membrane transporters and ribosomal polypeptides. Suitable test compounds include polypeptides, polypeptides, carbohydrates, lipids, nucleic acids (e.g. DNA, RNA, and modified forms thereof), as well as small organic compounds (e.g. MW between 200 and 2000 Da). The test compounds may be provided individually, but will typically be part of a library (e.g. a combinatorial library). Methods for detecting a binding interaction include NMR, filter-binding assays, gel-retardation assays, displacement assays, surface plasmon resonance, reverse two-hybrid etc. A compound which binds to a polypeptide of the invention can be tested for antibiotic activity by contacting the compound with Hib bacteria and then monitoring for inhibition of growth. The invention also provides a compound identified using these methods.

[0139] Preferably, the process comprises the steps of: (a) contacting a polypeptide of the invention with one or more candidate compounds to give a mixture; (b) incubating the mixture to allow polypeptide and the candidate compound(s) to interact; and (c) assessing whether the candidate compound binds to the polypeptide or modulates its activity.

[0140] Once a candidate compound has been identified in vitro as a compound that binds to a polypeptide of the invention then it may be desirable to perform further experiments to confirm the in vivo function of the compound in inhibiting bacterial growth and/or survival. Thus the method comprise the further step of contacting the compound with a Hib bacterium and assessing its effect.

[0141] The polypeptide used in the screening process may be free in solution, affixed to a solid support, located on a cell surface or located intracellularly. Preferably, the binding of a candidate compound to the polypeptide is detected by means of a label directly or indirectly associated with the candidate compound. The label may be a fluorophore, radioisotope, or other detectable label.

### General

[0142] The invention provides a computer-readable medium (e.g. a floppy disk, a hard disk, a CD-ROM, a DVD etc.) and/or a computer memory and/or a computer database containing one or more of the sequences in the sequence listing.

[0143] The term “comprising” encompasses “including” as well as “consisting” e.g. a composition “comprising” X may consist exclusively of X or may include something additional e.g. X+Y.

[0144] The term “about” in relation to a numerical value x means, for example, x±10%.

[0145] The word “substantially” does not exclude “completely” e.g. a composition which is “substantially free” from Y may be completely free from Y. Where necessary, the word “substantially” may be omitted from the definition of the invention.

[0146] The N-terminus residues in the amino acid sequences in the sequence listing are given as the amino acid encoded by the first codon in the corresponding nucleotide sequence. Where the first codon is not ATG, it will be understood that it will be translated as methionine when the codon is a start codon, but will be translated as the indicated non-Met amino acid when the sequence is at the C-terminus of a fusion partner. The invention specifically discloses and encompasses each of the amino acid sequences of the sequence listing having a N-terminus methionine residue (e.g. a formyl-methionine residue) in place of any indicated non-Met residue.

[0147] As indicated in the above text, nucleic acids and polypeptides of the invention may include sequences that:
[0148] (a) are identical (i.e. 100% identical) to the sequences disclosed in the sequence listing;
[0149] (b) share sequence identity with the sequences disclosed in the sequence listing;
[0150] (c) have 1, 2, 3, 4, 5, 6, 7, 8, 9 or 10 single nucleotide or amino acid alterations (deletions, insertions, substitutions), which may be at separate locations or may be contiguous, as compared to the sequences of (a) or (b); and
[0151] (d) when aligned with a particular sequence from the sequence listing using a pairwise alignment algorithm, a moving window of x monomers (amino acids or nucleotides) moving from start (N-terminus or 5′) to end (C-terminus of 3′), such that for an alignment that extends to p monomers (where p>x) there are p−x+1 such windows, each window has at least x·y identical aligned monomers, where: x is selected from 20, 25, 30, 35, 40, 45, 50, 60, 70, 80, 90, 100, 150, 200;y is selected from 0.50, 0.60, 0.70, 0.75, 0.80, 0.85, 0.90, 0.91, 0.92, 0.93, 0.94, 0.95, 0.96, 0.97, 0.98, 0.99; and if x·y is is not an integer then it is rounded up to the nearest integer. The preferred pairwise alignment algorithm is the Needleman-Wunsch global alignment algorithm [140], using default parameters (e.g. with Gap opening penalty=10.0, and with Gap extension penalty=0.5, using the EBLOSUM62 scoring matrix). This algorithm is conveniently implemented in the needle tool in the EMBOSS package [141].

[0152] The nucleic acids and polypeptides of the invention may additionally have further sequences to the N-terminus/5′ and/or C-terminus/3′ of these sequences (a) to (d).

[0153] The practice of the present invention will employ, unless otherwise indicated, conventional methods of chemistry, biochemistry, molecular biology, immunology and pharmacology, within the skill of the art. Such techniques are explained fully in the literature. See, e.g., references 142-149, etc.

### BRIEF DESCRIPTION OF DRAWINGS

[0154] There are no drawings.

### MODES FOR CARRYING OUT THE INVENTION

[0155] Genome sequencing has been carried out on a Hib isolate (strain HK707). A genome sequence is given as SEQ ID NO: 3707. A total of 1853 coding sequences were identified in this genome, and these are given in the sequence listing together with their inferred translation products. Annotation of these polypeptide sequences is given in Table I. From the sequenced material, polypeptide-coding sequences of particular interest were selected for further work, with particular attention to immunogenic proteins for vaccine development.

### Lipoproteins

[0156] Of the 1853 encoded sequences, the following 32 were identified as lipoproteins: HIB0150; HIB0158; HIB0164; HIB0233; HIB0374; HIB0382; HIB0426; HIB0469; HIB0723; HIB0733; HIB0734; HIB0740; HIB0750; HIB0761; HIB0838; HIB0971; HIB0984; HIB1015; HIB1027; HIB1038; HIB1160; HIB1253; HIB1255; HIB1349; HIB1384; HIB1407; HIB1557; HIB1564; HIB1654; HIB1655; HIB1679; and HIB1722. Lipoproteins are surface-exposed and, as such, they represent accessible immunological targets e.g. for diagnostic and for immunisation purposes. Moreover, it has been found in B.burgdorferi [150] that OspA protein is immunogenic in a lipidated form but is non-immunogenic in a non-lipidated form, and the authors concluded that post-translational lipid attachment is a critical determinant of OspA immunogenicity.

[0157] HIB1027 and HIB31255 show similarity to proteins ‘287’ and ‘741’ from Neisseria meningitidis, which are both candidate proteins for use in vaccines. HIB1027 and HIB1255 align as follows (T-COFFEE version 2.08):

| | |
|---|---|
| HIB1027 | MKLNLSKFSLTILTTVMLASCGSGGGDNTQLVSPPKPAEQSKPAEQSKPA |
| HIB1255 | MKITFTRSLLATAVMVGLTACGSGGGNG---------------------- |
| | **:.::: *: . * *::******:. |
| HIB1027 | DQSKSVEQSILGMPERLPTNTGLAFSIKTEDEGNINTIKNEQELIATNNF |
| HIB1255 | -MNNNTTSQVTG-------KTGAMYTVSLTNDNKIGTVTKTP--LNNSDI |
| | .:.. ..: * :** :::. ::.:*.*:.: : ..:: |
| HIB1027 | ASINVDGKNIPIDFKLEPSQGWTKEGAFIEELNLAPHICCGKYT-----D |
| HIB1255 | NSLNLD ------------------SASTQRINEAMNKISEEFKSKTGLD |
| | *:*:* .* :.:* * : . ::. * |
| HIB1027 | VRFGAIASHSFGQDDILFYNGNPSNSVPESGEVTYKGESIMADKGNSVFG |
| HIB1255 | VVTGA-AIVSNGEKFHIIYNGNPTETMPVQGSIHYKGSAVLGGWSADAPL |
| | * ** * * *:. ::*****::::* .*.: ***.:::.. . .. |
| HIB1027 | GYRKGTSEFKVNFGDKKLSGSLNVDSPKYDVESGESKFNKVKVDINADIS |
| HIB1255 | SIEKGTSQFDVNFADSTLTGTLNV--PNFSL-----------VSISASVS |
| | . .****:*.***.*..*:*.*** *::.: *.*.*.:* |
| HIB1027 | GNKFYGSAKSSSFVSEAVSEGKFYGDGAKELGGMVKAKDNSWVGAYGAKA |
| HIB1255 | GNSFSGRATSPDAPDGAVVEGKFYGKDALGLSGMLKT--NTFTDNFGGAG |
| | **.* * *.*.. . ** ******..* *.**:*: *::.. :*. . |
| HIB1027 | Q----------- |
| HIB1255 | IFSAIDETKITQ |

[0158] Lipoproteins generally have a N-terminal cysteine residue, to which the lipid is covalently attached. To prepare the lipoprotein via bacterial expression generally requires a suitable N-terminal signal peptide to direct lipidation by diacylglyceryl transferase, followed by cleavage by lipoprotein-specific (type II) SPase. Lipoproteins of the invention will thus typically have a N-terminal cysteine, but will be products of post-translational modification of a nascent protein which has the usual N-terminal methionine. Such lipoproteins may be associated with a lipid bilayer and may be solubilised with detergent.

[0159] Processing and lipidation of the HIB1027 sequence will give the following mature sequence (SEQ ID NO: 3708):

CGSGGGDNTQLVSPPKPAEQSKPAEQSKPADQSKSVEQSILGMPERLPTN
TGLAFSIKTEDEGNINTIKNEQELIATNNFASINVDGKNIPIDFKLEPSQ
GWTKEGAFIEELNLAPHICCGKYTDVRFGAIASHSFGQDDILFYNGNPSN
SVPESGEVTYKGESIMADKGNSVFGGYRKGTSEFKVNFGDKKLSGSLNVD
SPKYDVESGESKFNKVKVDINADISGNKFYGSAKSSSFVSEAVSEGKFYG
DGAKELGGMVKAKDNSWVGAYGAKAQ

[0160] Processing and lipidation of the HIB1255 sequence will give the following mature sequence (SEQ ID NO: 3709):

CGSGGGNGMNNNTTSQVTGKTGAMYTVSLTNDNKIGTVTKTPLNNSDINS
LNLDSASTQRINEAMNKISEEFKSKTGLDVVTGAAIVSNGEKFHIIYNGN
PTETMPVQGSIHYKGSAVLGGWSADAPLSIEKGTSQFDVNFADSTLTGTL
NVPNFSLVSISASVSGNSFSGRATSPDAPDGAVVEGKFYGKDALGLSGML
KTNTFTDNFGGAGIFSAIDETKITQ

[0161] Compared to the genomes of H.influenzae Rd and of a non-typeable H.influenzae, HIB1255 is part of an insert, between homologous sequences hi1192 and hi1193. This 2.3 kb insert contains three coding sequences and has a GC content of 32.4%.

[0162] Their similarity to N.meningitidis vaccine antigens, and their absence in non-pathogenic strains, suggests that HIB1027 and HIB1255 are useful Hib immunogens.

### Inner and Outer Membranes

[0163] As H.influenzae is a Grain-negative bacterium, its cell wall includes an outer membrane. Of the 1853 coding sequences, the following 17 were identified as being located in this outer membrane: HIB0124; HIB0374; HIB0382; HIB0394; HIB0426; HIB0733; HIB0734; HIB0965; HIB0966; HIB1224; HIB1561; HIB1564; HIB1566; HIB1654; HIB1665; HIB1679; and HIB1835. Outer membrane proteins (OMPs) are surface-exposed and, as such, they represent accessible immunological targets e.g. for diagnostic and for immunisation purposes. OMPs are often invasins, adhesins, etc. which, if blocked, offers a means of preventing bacterial infection.

[0164] As H.influenzae is a Gram-negative bacterium, it also has an inner membrane. Of the 1853 coding sequences, the following pair were identified as being located in the inner membrane: HIB1055; HIB1086. Inner membrane proteins represent useful immunological targets e.g. for diagnostic and for immunisation purposes.

### Periplasm

[0165] As H.influenzae is a Gram-negative bacterium, it has a periplasm between its cell cytoplasmic membrane and its outer membrane. Of the 1853 coding sequences, the following 16 were identified as being located in the periplasm: HIB0089; HIB0288; HIB0338; HIB0341; HIB0525; HIB0999; H1088; HIB1141; HIB1172; HIB1185; HIB1238; HIB1334; HIB1576; HIB1583; HIB1709; and HIB1761. Periplasmic proteins represent useful immunological targets e.g. for diagnostic and for immunisation purposes.

[0166] It will be understood that the invention has been described by way of example only and modifications may be made whilst remaining within the scope and spirit of the invention.

TABLE I
Annotations

| HIB | Annotation |
|---|---|
| 0001 | Glyceraldehyde 3-phosphate dehydrogenase, C-terminal domain |
| 0002 | FadD (LACS) [6.2.1.3] |
| 0003 | Protein |
| 0004 | predicted metal-dependent hydrolase |
| 0005 | formate dehydrogenase family accessory protein FdhD (fdhD) |
| 0006 | 1.2.1.2 [1.2.1.2] |
| 0007 | formate dehydrogenase, alpha subunit [1.2.1.2] |
| 0008 | formate dehydrogenase, beta subunit (FdxH) [1.2.1.2] |
| 0009 | formate dehydrogenase, gamma subunit [1.2.1.2] |
| 0010 | formate dehydrogenase accessory protein FdhE (fdhE) |
| 0011 | ribosomal-protein-alanine acetyltransferase (rimI) [2.3.1.128] |
| 0012 | DNA polymerase III, psi subunit (holD) [2.7.7.7] |
| 0013 | Ribosomal RNA small subunit methyltransferase C (rRNA(guanine-N(2)-)-methyltransferase) (16S rRNA |
| | m2G1207methyltransferase) (AE005668) [2.1.1.52] |
| 0014 | GTP-binding protein Era (era) |
| 0015 | ribonuclease III (rnc) [3.1.26.3] |
| 0016 | Signal peptidase I (SPase I) (Leader peptidase I) (lepB) [3.4.21.89] |
| 0017 | GTP-binding protein LepA (lepA) |
| 0018 | Protein (pfl) [2.3.1.54] |
| 0019 | uracil-DNA glycosylase (ung) [3.2.2.—] |
| 0020 | tRNA-i(6)A37 thiotransferase enzyme MiaB (miaB) |
| 0021 | 2-oxoglutarate/malate translocator (SODiT1) |
| 0022 | 2.7.7.61 (citG) [2.7.7.61] |
| 0023 | citrate lyase, alpha subunit (citF) [2.8.3.10] |
| 0024 | citrate lyase, beta subunit (citE) [4.1.3.6] |
| 0025 | citrate lyase acyl carrier protein (citD) |
| 0026 | citrate lyase ligase (citC) [6.2.1.22] |
| 0027 | lipoic acid synthetase (lipA) |
| 0028 | lipoate-protein ligase B (lipB) |
| 0029 | UPF0250 protein |
| 0030 | Penicillin-binding protein 5 precursor (D-alanyl-D-alaninecarboxypeptidase fraction A) (DD-peptidase)(DD- |
| | carboxypeptidase) (PBP-5) (dacA) [3.4.16.4] |
| 0031 | RlpA-like protein precursor (rlpA) |
| 0032 | rod shape-determining protein RodA (rodA) |
| 0033 | Penicillin-binding protein 2 (PBP-2) (pbp2) |
| 0034 | conserved hypothetical protein TIGR00246 |
| 0035 | iojap-related protein |
| 0036 | Hypothetical membrane protein |
| 0037 | ABC transporter, ATP-binding protein |
| 0038 | rod shape-determining protein (mreB) |
| 0039 | rod shape-determining protein MreC (mreC) |
| 0040 | rod shape-determining protein MreD (mreD) |
| 0041 | conserved hypothetical protein TIGR01619 |
| 0042 | exodeoxyribonuclease III (xth) [3.1.11.2] |
| 0043 | pseudouridine synthase Rlu family protein, TIGR01621 |
| 0044 | conserved hypothetical protein TIGR01620 |
| 0045 | Integral membrane protein |
| 0046 | conserved hypothetical protein YtfJ-family, TIGR01626 |
| 0047 | PhnA protein homolog (phnA) |
| 0048 | IS103 orf (orfB) |
| 0049 | glutamate--cysteine ligase, putative/amino acid ligase, putative |
| 0050 | membrane protein, TerC family |
| 0051 | excinuclease ABC, C subunit (uvrC) |
| 0052 | 3-deoxy-D-manno-octulosonate cytidylyltransferase (kdsB) [2.7.7.38] |
| 0053 | tetraacyldisaccharide 4′-kinase (lpxK) [2.7.1.130] |
| 0054 | lipid A export ATP-binding/permease protein MsbA (msbA) |
| 0055 | DNA internalization-related competence protein ComEC/Rec2 |
| 0056 | DnaK suppressor protein homolog (dksA) |
| 0057 | PcnB (pcnB) [2.7.7.19] |
| 0058 | 2-amino-4-hydroxy-6-hydroxymethyldihydropteridine pyrophosphokinase (folK) [2.7.6.3] |
| 0059 | conserved hypothetical protein TIGR00150 |
| 0060 | N-acetylmuramoyl-L-alanine amidase [3.5.1.28] |
| 0061 | DNA mismatch repair protein mutL (mutL) |
| 0062 | tRNA delta(2)-isopentenylpyrophosphate transferase (miaA) [2.5.1.8] |
| 0063 | Glutamate-ammonia-ligase adenylyltransferase (Glutamine-synthetase adenylyltransferase) (ATASE) (glnE) |
| | [2.7.7.42] |
| 0064 | DNA repair protein RecN (recN) |
| 0065 | Predicted kinase [2.7.1.23] |
| 0066 | heat shock protein B25.3 homolog (grpE) |
| 0067 | nucleotidyltransferase domain protein |
| 0068 | nucleotidyltransferase substrate binding protein, HI0074 family subfamily |
| 0069 | Anaerobic ribonucleoside-triphosphate reductase (nrdD) [1.17.4.2] |
| 0070 | acyl-CoA thioesterase II (tesB) [3.1.2.—] |
| 0071 | cysteinyl-tRNA synthetase (cysS) [6.1.1.16] |
| 0072 | Peptidyl-prolyl cis-trans isomerase B (PPIase B)(Rotamase B) (ppiB) [5.2.1.8] |
| 0073 | Mg-dependent DNase [3.1.21.—] |
| 0074 | 5-METHYLTETRAHYDROPTEROYLTRIGLUTAMATE--HOMOCYSTEINE METHYLTRANSFERASE |
| | (METHIONINE SYNTHASE, VITAMIN-B12 INDEPENDENT ISOZYME)(COBALAMIN-INDEPENDENT |
| | METHIONINE SYNTHASE) |
| 0075 | thioredoxin (trx) |
| 0076 | 2-hydroxyacid dehydrogenase homolog (ldhA) [1.1.1.—] |
| 0077 | cystathionine gamma-lyase homolog (metB) [2.5.1.48] |
| 0078 | threonine synthase (thrC) [4.2.3.1] |
| 0079 | homoserine kinase (thrB) [2.7.1.39] |
| 0080 | Bifunctional aspartokinase/homoserine dehydrogenase (AK-HD)[Includes: Aspartokinase; Homoserine |
| | dehydrogenase(EC 1.1.1.3)] [2.7.2.4] |
| 0081 | conserved hypothetical protein TIGR00044 |
| 0082 | Glycerate kinase [2.7.1.31] |
| 0083 | H+/gluconate symporter (gntP) |
| 0084 | sugar diacid utilization regulator |
| 0085 | 4-hydroxybutyrate dehydrogenase (gntP) [1.1.1.61] |
| 0086 | Putative HTH-type transcriptional regulator (glpR) |
| 0087 | methyltransferase |
| 0088 | conserved hypothetical protein |
| 0089 | Iron-utilization periplasmic protein precursor (Major ferric ironbinding protein) (Iron-regulated 40 kDa protein) |
| | (MIRP) (Fe(3+)-binding protein) (hitA) |
| 0090 | hypothetical protein |
| 0091 | iron ABC transporter, permease protein hitB [validated] (III) |
| 0092 | iron utilization protein C (hitC) [3.6.3.30] |
| 0093 | D-alanyl-D-alanine carboxypeptidase |
| 0094 | succinyl-diaminopimelate desuccinylase (dapE) [3.5.1.18] |
| 0095 | Protein [1.—.—.—] |
| 0096 | heat shock protein htpG (htpG) |
| 0097 | conserved hypothetical protein TIGR00486 |
| 0098 | signal recognition particle protein (ffh) |
| 0099 | similar to [SwissProt Accession Number P37908] |
| 0100 | Protein of unknown function (DUF1212) family |
| 0101 | Protein yjjB |
| 0102 | conserved hypothetical protein |
| 0103 | seryl-tRNA synthetase (serS) [6.1.1.11] |
| 0104 | Glutathione S-transferase (bphH) [2.5.1.18] |
| 0105 | Heme/hemopexin utilization protein C precursor (hemR) |
| 0106 | Heme/hemopexin utilization protein C precursor (hemR) |
| 0107 | predicted N6-adenine-specific DNA methylase |
| 0108 | lytic murein transglycosylase A (AF226403) [3.2.1.—] |
| 0109 | HesA/MoeB/ThiF family protein |
| 0110 | High-affinity zinc uptake system protein znuA precursor (AE005408) |
| 0111 | conserved hypothetical protein |
| 0112 | UDP-N-acetylmuramate:L-alanyl-gamma-D-glutamyl-meso-diaminopimelate ligase (mpl) |
| 0113 | cystathionine beta-lyase (metC) [4.4.1.8] |
| 0114 | TsaA (tsaA) [1.6.4.—] |
| 0115 | CDP-diacylglycerol--glycerol-3-phosphate 3-phosphatidyltransferase (pgsA) [2.7.8.5] |
| 0116 | inorganic pyrophosphatase (ppa) [3.6.1.1] |
| 0117 | xanthine/uracil permease family protein |
| 0118 | hypothetical protein |
| 0119 | uridine kinase (udk) [2.7.1.48] |
| 0120 | Deoxycytidine triphosphate deaminase (dCTP deaminase) (dcd) [3.5.4.13] |
| 0121 | conserved hypothetical protein |
| 0122 | Sugar efflux transporter |
| 0123 | GTP-binding protein engA |
| 0124 | Outer membrane protein P2 precursor (OMP P2) (ompP2) |
| 0125 | N-acetylglucosamine-6-phosphate deacetylase (nagA) [3.5.1.25] |
| 0126 | glucosamine-6-phosphate isomerase (nagB) [3.5.99.6] |
| 0127 | N-acetylneuraminate lyase (nanA) [4.1.3.3] |
| 0128 | Transcriptional regulator |
| 0129 | 2.7.1.60 [2.7.1.60] |
| 0130 | possible N-acetylmannosamine-6-P epimerase [5.1.3.9] |
| 0131 | Protein HI0146 precursor |
| 0132 | N-acetylneuraminate transporter small subunit |
| 0133 | Protein HI0148 precursor |
| 0134 | conserved hypothetical protein |
| 0135 | HflC protein (hflC) |
| 0136 | HflK protein (hflK) [3.4.—.—] |
| 0137 | Putative 4′-phosphopantetheinyl transferase [2.7.8.—] |
| 0138 | hypothetical protein |
| 0139 | anaerobic C4-dicarboxylate transporter (dcuB) |
| 0140 | Acyl carrier protein (ACP)-related protein |
| 0141 | 3-oxoacyl-[acyl-carrier protein] reductase (3-ketoacyl-acyl carrier protein reductase) (fabG) [1.1.1.100] |
| 0142 | malonyl CoA-acyl carrier protein transacylase (fabD) [2.3.1.39] |
| 0143 | hypothetical protein |
| 0144 | 3-oxoacyl-[acyl-carrier-protein] synthase III (Beta-ketoacyl-ACP synthase III) (KAS III) (fabH) [2.3.1.41] |
| 0145 | hypothetical protein |
| 0146 | ribosomal protein L32 (rpmF) |
| 0147 | Uncharacterized ACR, COG1399 |
| 0148 | phosphatidylserine decarboxylase (psd) [4.1.1.65] |
| 0149 | glutathione-disulfide reductase (gor) [1.8.1.7] |
| 0150 | Hypothetical lipoprotein HI0162 precursor |
| 0151 | BolA protein homolog (bolA) |
| 0152 | NADH:ubiquinone oxidoreductase, Na(+)-translocating, A subunit (nqrA) [1.6.5.—] |
| 0153 | NADH:ubiquinone oxidoreductase, Na(+)-translocating, B subunit (nqrB) [1.6.5.—] |
| 0154 | NADH:ubiquinone oxidoreductase, Na(+)-translocating, C subunit (nqrC) [1.6.5.—] |
| 0155 | NADH:ubiquinone oxidoreductase, Na(+)-translocating, D subunit (nqrD) [1.6.5.—] |
| 0156 | NADH:ubiquinone oxidoreductase, Na(+)-translocating, E subunit (nqrE) [1.6.5.—] |
| 0157 | NADH:ubiquinone oxidoreductase, Na(+)-translocating, F subunit (nqrF) [1.6.5.—] |
| 0158 | Thiamine biosynthesis lipoprotein apbE precursor |
| 0159 | ApbE family |
| 0160 | tRNA (5-methylaminomethyl-2-thiouridylate)-methyltransferase (trmU) [2.1.1.61] |
| 0161 | conserved hypothetical protein TIGR00726 |
| 0162 | Ribosomal large subunit pseudouridine synthase D(Pseudouridylate synthase) (Uracil hydrolyase) (sfhB) [4.2.1.70] |
| 0163 | unkown |
| 0164 | lipoprotein, putative |
| 0165 | formate acetyltransferase activating enzyme, lyase 1-specific (act) [1.97.1.4] |
| 0166 | formate acetyltransferase (pflB) [2.3.1.54] |
| 0167 | Formate transporter 1 FocA (Formate channel 1) (formate) |
| 0168 | hypothetical protein |
| 0169 | ROK family protein VC1532 |
| 0170 | sodium/alanine symporter |
| 0171 | Protein [3.1.1.1] |
| 0172 | alcohol dehydrogenase (adhC) [1.1.1.1] |
| 0173 | transcription regulator, MerR family NMB1303 (probale) |
| 0174 | o261 (YIGT) |
| 0175 | Sec-independent protein translocase protein tatB homolog |
| 0176 | Sec-independent protein translocase TatC (tatC) |
| 0177 | NADP-specific glutamate dehydrogenase (NADP-GDH) (gdhA) [1.4.1.4] |
| 0178 | iron repressor protein (fur) |
| 0179 | flavodoxin |
| 0180 | hydrolase, alpha/beta fold family (acoC) [3.1.—.—] |
| 0181 | SeqA protein |
| 0182 | O-succinylbenzoate-CoA ligase (menE) [6.2.1.26] |
| 0183 | UPF0003 protein HI0195.1 precursor (aefA) |
| 0184 | chorismate synthase (aroC) [4.2.3.5] |
| 0185 | Penicillin-insensitive murein endopeptidase precursor (mepA) [3.4.99.—] |
| 0186 | predicted permease (orf9) |
| 0187 | lipid A biosynthesis (KDO)2-(lauroyl)-lipid IVA acyltransferase (msbB) [2.3.1.—] |
| 0188 | selenide, water dikinase (selD) [2.7.9.3] |
| 0189 | ribosomal protein L19 (rplS) |
| 0190 | tRNA (guanine-N1)-methyltransferase (trmD) [2.1.1.31] |
| 0191 | 16S rRNA processing protein rimM |
| 0192 | ribosomal protein S16 (rpsP) |
| 0193 | Protein HI0205 precursor |
| 0194 | NAD pyrophosphatase/5′-nucleotidase NadN (nadN) |
| 0195 | shikimate kinase (aroK) [2.7.1.71] |
| 0196 | 3-dehydroquinate synthase (aroB) [4.2.3.4] |
| 0197 | DNA adenine methylase (Deoxyadenosyl-methyltransferase)(DNA adenine methyltransferase) (M. HindIV) (dam) |
| | [2.1.1.72] |
| 0198 | Phosphatidylglycerophosphatase B (pgpB) [3.1.3.27] |
| 0199 | GTP cyclohydrolase II (ribA) [3.5.4.25] |
| 0200 | Putative binding protein HI0213 precursor (AA1) |
| 0201 | Protein of unknown function (DUF454) family |
| 0202 | Oligopeptidase A (prlC) [3.4.24.70] |
| 0203 | type I restriction-modification system, M subunit (hsdM) [2.1.1.72] |
| 0204 | HP790-like protein (hsdS) [3.1.21.3] |
| 0205 | anticodon nuclease NMB0832 |
| 0206 | DNA-binding protein (partial) |
| 0207 | Type I site-specific deoxyribonuclease HsdR (hsdR) [3.1.21.3] |
| 0208 | membrane protein ykgB |
| 0209 | hypothetical protein |
| 0210 | aerobic respiration control sensor protein [2.7.3.—] |
| 0211 | uracil-DNA glycosylase |
| 0212 | BirA bifunctional protein [Includes: Biotin operon repressor; Biotin--[acetyl-CoA-carboxylase] synthetase(Biotin-- |
| | protein ligase)] (birA) [6.3.4.15] |
| 0213 | inosine-5′-monophosphate dehydrogenase (guaB) [1.1.1.205] |
| 0214 | hypothetical protein |
| 0215 | GMP synthase [glutamine-hydrolyzing] (Glutamineamidotransferase) (GMP synthetase) (guaA) [6.3.5.2] |
| 0216 | rarD protein (rarD) |
| 0217 | AsnC-family transcriptional regulator |
| 0218 | Na+/H+ antiporter NhaA (nhaA) |
| 0219 | branched-chain amino acid transport system II carrier protein (brnQ) |
| 0220 | Glutathionylspermidine synthase (orfa) [6.3.1.8] |
| 0221 | putative cytoplasmic protein |
| 0222 | conserved hypothetical protein |
| 0223 | Protein HI0246 precursor |
| 0224 | S-adenosylmethionine:tRNA ribosyltransferase-isomerase (queA) [5.—.—.—] |
| 0225 | conserved hypothetical protein |
| 0226 | SSB (ssb) |
| 0227 | excinuclease ABC, A subunit (uvrA) |
| 0228 | 3.4.21.—(iga1) [3.4.21.—] |
| 0229 | hypothetical protein |
| 0230 | Protein |
| 0231 | conserved hypothetical protein |
| 0232 | Polyribonucleotide nucleotidyltransferase (Polynucleotidephosphorylase) (PNPase) (pnp) [2.7.7.8] |
| 0233 | Lipoprotein nlpI homolog precursor |
| 0234 | Cold-shock DEAD-box protein A homolog (ATP-dependent RNA helicase deaDhomolog) (deaD) |
| 0235 | conserved hypothetical protein |
| 0236 | Uncharacterized protein conserved in bacteria |
| 0237 | arsenate reductase (arsC) [1.20.4.1] |
| 0238 | PerM (perM) |
| 0239 | Protein-export membrane protein secF (secF) |
| 0240 | Protein-export membrane protein secD (secD) |
| 0241 | preprotein translocase, YajC subunit (yajC) |
| 0242 | Uncharacterized protein family UPF0033 superfamily |
| 0243 | Domain of Unknown function domain protein |
| 0244 | queuine tRNA-ribosyltransferase (tgt) [2.4.2.29] |
| 0245 | conserved hypothetical protein |
| 0246 | conserved hypothetical protein |
| 0247 | TonB protein (tonB) |
| 0248 | Biopolymer transport exbD protein (exbD) |
| 0249 | Biopolymer transport exbB protein (exbB) |
| 0250 | Bacterioferritin comigratory protein homolog (bcp) |
| 0251 | dihydrodipicolinate synthase (dapA) [4.2.1.52] |
| 0252 | Protein |
| 0253 | ribosomal subunit interface protein (yfiA) |
| 0254 | glycosyl transferase (glucosyl) [2.4.1.44] |
| 0255 | non-canonical purine NTP pyrophosphatase, rdgB/HAM1 family (rdgB) |
| 0256 | KDO kinase [2.7.1.—] |
| 0257 | OpsX [2.—.—.—] |
| 0258 | Heme/hemopexin utilization protein C precursor (hemR) |
| 0259 | heme-hemopexin utilization protein B (hxuB) |
| 0260 | Heme/hemopexin-binding protein precursor (Heme:hemopexin utilizationprotein A) (hxuA) |
| 0261 | heme-hemopexin utilization protein A (hxuA) |
| 0262 | dihydroneopterin aldolase (folB) [4.1.2.25] |
| 0263 | conserved hypothetical protein TIGR00023 |
| 0264 | Sensor protein narQ homolog (narQ) [2.7.3.—] |
| 0265 | UDP-N-acetylenolpyruvoylglucosamine reductase (murB) [1.1.1.158] |
| 0266 | RNA polymerase sigma-32 factor (rpoH) [2.7.7.6] |
| 0267 | tRNA-dihydrouridine synthase C [1.—.—.—] |
| 0268 | DnaJ-like protein djlA (orf81) |
| 0269 | orotate phosphoribosyltransferase (pyrE) [2.4.2.10] |
| 0270 | ribonuclease PH (rph) [2.7.7.56] |
| 0271 | glutamyl-tRNA synthetase (gltX) [6.1.1.17] |
| 0272 | conserved hypothetical protein |
| 0273 | ribonuclease BN, putative [3.1.—.—] |
| 0274 | SEC-C motif domain protein |
| 0275 | MOSC domain protein |
| 0276 | hypothetical protein |
| 0277 | uridine phosphorylase (udp) [2.4.2.3] |
| 0278 | transmembrane transport protein |
| 0279 | Predicted hydrolase or acyltransferase [3.1.—.—] |
| 0280 | 2-succinyl-6-hydroxy-2,4-cyclohexadiene-1-carboxylic acid synthase/2-oxoglutarate decarboxylase (menD) |
| | [4.1.1.71] |
| 0281 | Menaquinone-specific isochorismate synthase(Isochorismate mutase) (menF) [5.4.4.2] |
| 0282 | conserved hypothetical protein |
| 0283 | aspartate transaminase (ASPAT) [2.6.1.—] |
| 0284 | Tryptophan-specific transport protein (Tryptophan permease) (mtr) |
| 0285 | L-serine ammonia-lyase (sdaA) [4.3.1.17] |
| 0286 | Serine transporter (sdaC) |
| 0287 | copper-translocating P-type ATPase [3.6.3.4] |
| 0288 | periplasmic mercuric ion binding protein (merP) |
| 0289 | heavy-metal transporting P-type ATPase CAC3655 (merP) |
| 0290 | heavy-metal transporting P-type ATPase CAC3655 (merP) |
| 0291 | heavy-metal transporting CPx-type ATPase (merP) |
| 0292 | Cu(I)-responsive transcriptional regulator (cueR) |
| 0293 | Met Apo-repressor, MetJ |
| 0294 | transcription termination factor Rho (rho) |
| 0295 | PilD (hopD) [3.4.23.43] |
| 0296 | Protein transport protein hofC homolog (pilC) |
| 0297 | Protein transport protein hofB homolog (pilB) |
| 0298 | Prepilin peptidase dependent protein D homolog precursor (PilE) |
| 0299 | AmpD protein homolog (ampD) |
| 0300 | Magnesium and cobalt efflux protein corC (tlyC) |
| 0301 | Apolipoprotein N-acyltransferase (ALP N-acyltransferase)(Copper homeostasis protein cutE homolog) (cutE) |
| | [2.3.1.—] |
| 0302 | conserved hypothetical protein TIGR00046 |
| 0303 | Uncharacterized ACR, COG1678 |
| 0304 | conserved hypothetical protein TIGR00250 |
| 0305 | Recombination associated protein rdgC |
| 0306 | pyrroline-5-carboxylate reductase (proC) [1.5.1.2] |
| 0307 | MFS transporter |
| 0308 | tyrosine recombinase XerD (xerD) |
| 0309 | conserved hypothetical protein |
| 0310 | Holliday junction DNA helicase RuvB (ruvB) |
| 0311 | Holliday junction DNA helicase RuvA (ruvA) |
| 0312 | crossover junction endodeoxyribonuclease RuvC (ruvC) [3.1.22.4] |
| 0313 | conserved hypothetical protein TIGR01033 |
| 0314 | dATP pyrophosphohydrolase (ntpA) [3.6.1.—] |
| 0315 | aspartyl-tRNA synthetase (aspS) [6.1.1.12] |
| 0316 | HI0318 homolog |
| 0317 | methyltransferase, putative |
| 0318 | lactoylglutathione lyase (gloA) [4.4.1.5] |
| 0319 | ribonuclease T (rnt) [3.1.13.—] |
| 0320 | predicted permease |
| 0321 | conserved hypothetical protein |
| 0322 | translation elongation factor P (efp) |
| 0323 | lysine 2; 3-aminomutase |
| 0324 | Opacity associated proteins oapA (oapA) |
| 0325 | OapB (oapB) |
| 0326 | DNA repair protein RecO (recO) |
| 0327 | 23S rRNA (uracil-5-)-methyltransferase RumA (rumA) [2.1.1.—] |
| 0328 | GTP pyrophosphokinase (ATP:GTP 3′-pyrophosphotransferase)(ppGpp synthetase I) ((P)ppGpp synthetase) (relA) |
| | [2.7.6.5] |
| 0329 | Diacylglycerol kinase (DAGK) (Diglyceride kinase)(DGK) (dgkA) [2.7.1.107] |
| 0330 | Molybdopterin biosynthesis mog protein (mog) |
| 0331 | Nitrogen regulatory protein P-II |
| 0332 | Domain of unknown function, putative |
| 0333 | Primosomal protein N′ (Replication factor Y) (priA) |
| 0334 | tRNA (guanine-N(7)-)-methyltransferase (tRNA(m7G46)-methyltransferase) [2.1.1.33] |
| 0335 | Protein |
| 0336 | ferredoxin-type protein NapF (napF) |
| 0337 | NapD protein (napD) |
| 0338 | periplasmic nitrate reductase, large subunit (napA) [1.7.99.4] |
| 0339 | Ferredoxin-type protein napG homolog (napG) |
| 0340 | Ferredoxin-type protein napH homolog (napH) |
| 0341 | periplasmic nitrate reductase, diheme cytochrome c subunit (napB) |
| 0342 | Cytochrome c-type protein napC (napC) |
| 0343 | adenylate kinase (adk) [2.7.4.3] |
| 0344 | unnamed protein product; ORF3 (ampG1) |
| 0345 | UDP-glucose 4-epimerase (galE) [5.1.3.2] |
| 0346 | unnamed protein product; ORF1 |
| 0347 | ABC transporter, ATP-binding protein |
| 0348 | ABC transporter permease protein (permease) |
| 0349 | thiamin biosynthesis associated protein (nmt1) |
| 0350 | transcription activator tenA (paralogs) |
| 0351 | YfeD (chelated) |
| 0352 | YfeC (chelated) |
| 0353 | YfeB (chelated) |
| 0354 | YfeA (chelated) |
| 0355 | hypothetical protein |
| 0356 | Penicillin-binding protein 7 homolog precursor (PBP-7) (D-alanyl-D-alanine-endopeptidase) (DD-endopeptidase) |
| | [3.4.99.—] |
| 0357 | hypothetical protein |
| 0358 | radical SAM enzyme, Cfr family |
| 0359 | possible fimbrial biogenesis and twitching motility protein PilF homolog (Tfp) |
| 0360 | conserved hypothetical protein |
| 0361 | 4-hydroxy-3-methylbut-2-en-1-yl diphosphate synthase (ispG) [1.17.4.3] |
| 0362 | histidyl-tRNA synthetase (hisS) [6.1.1.21] |
| 0363 | Protein |
| 0364 | Protein of unknown function (DUF528) superfamily |
| 0365 | ferredoxin, 2Fe-2S type, ISC system (fdx) |
| 0366 | Fe—S protein assembly chaperone HscA (hscA) |
| 0367 | conserved hypothetical protein |
| 0368 | co-chaperone Hsc20 (hscB) |
| 0369 | iron-sulfur cluster assembly protein IscA (iscA) |
| 0370 | FeS cluster assembly scaffold IscU (iscU) |
| 0371 | cysteine desulfurase IscS (iscS) [4.4.1.—] |
| 0372 | iron-sulfur cluster assembly transcription factor IscR (iscR) |
| 0373 | RNA methyltransferase, TrmH family, group 1 |
| 0374 | Outer membrane protein P6 precursor (OMP P6) (15 kDa peptidoglycan-associated lipoprotein) (PC protein) (pal) |
| 0375 | TolB protein precursor (tolB) |
| 0376 | TolA protein (tolA) |
| 0377 | TolR protein (tolR) |
| 0378 | TolQ protein (tolQ) |
| 0379 | YbgC protein |
| 0380 | Dnt (dinG) |
| 0381 | Inactive homolog of metal-dependent proteases (M22) [3.4.—.—] |
| 0382 | starvation-inducible outer membrane lipoprotein |
| 0383 | Long-chain-fatty-acid--CoA ligase (Long-chain acyl-CoAsynthetase) (fadD) [6.2.1.3] |
| 0384 | ribonuclease D (rnd) [3.1.26.3] |
| 0385 | O-antigen acetylase XF0778 (LPS) |
| 0386 | GTP-binding protein YchF (ychF) |
| 0387 | peptidyl-tRNA hydrolase (pth) [3.1.1.29] |
| 0388 | Protein |
| 0389 | Protein |
| 0390 | exodeoxyribonuclease VII, large subunit (xseA) [3.1.11.6] |
| 0391 | conserved hypothetical protein TIGR00052 |
| 0392 | Icc protein homolog (icc) [3.1.4.17] |
| 0393 | C4-dicarboxylate transport protein homolog b2343 |
| 0394 | Outer membrane protein P1 precursor (OMP P1) (fadL) |
| 0395 | Methylated-DNA--protein-cysteine methyltransferase (6-O-methylguanine-DNA methyltransferase) (O-6- |
| | methylguanine-DNA-alkyltransferase) (dat1) [2.1.1.63] |
| 0396 | DNA mismatch repair protein mutH (mutH) |
| 0397 | MesJ (mesJ) |
| 0398 | pyridoxal kinase [2.7.1.35] |
| 0399 | acetyl-CoA carboxylase, carboxyl transferase, alpha subunit (accA) [6.4.1.2] |
| 0400 | High-affinity zinc uptake system membrane protein znuB (PA5501) |
| 0401 | High-affinity zinc uptake system ATP-binding protein znuC (afuC) |
| 0402 | hypothetical protein |
| 0403 | membrane protein ECs2566 [similarity] [3.4.24.—] |
| 0404 | Transcriptional regulatory protein tyrR homolog (tyrR) |
| 0405 | host factor I (hfq) |
| 0406 | Ribosomal large subunit pseudouridine synthase C(Pseudouridylate synthase) (Uracil hydrolyase) (orfx) [4.2.1.70] |
| 0407 | ribonuclease E (rne) [3.1.4.—] |
| 0408 | Opa protein |
| 0409 | hydroxyethylthiazole kinase (thiM) [2.7.1.50] |
| 0410 | phosphomethylpyrimidine kinase (thiD) [2.7.4.7] |
| 0411 | thiamine-phosphate pyrophosphorylase (thiE) [2.5.1.3] |
| 0412 | major facilitator family transporter (AE005578) |
| 0413 | hypothetical protein |
| 0414 | collagenase (prtC) [3.4.—.—] |
| 0415 | ATP-dependent RNA helicase srmB homolog (srmB) |
| 0416 | Predicted O-methyltransferase (putative) |
| 0417 | YfiF protein (Fragment) [2.1.1.—] |
| 0418 | CDP-diacylglycerol--serine O-phosphatidyltransferase(Phosphatidylserine synthase) (pssA) [2.7.8.8] |
| 0419 | Fatty acid metabolism regulator protein (fadR) |
| 0420 | Na+/H+ antiporter NhaB (nhaB) |
| 0421 | Disulfide bond formation protein B (Disulfide oxidoreductase) (dsbB) [1.8.4.—] |
| 0422 | glucosamine--fructose-6-phosphate aminotransferase, isomerizing (glmS) [2.6.1.16] |
| 0423 | DNA-binding protein HU-2 (hupA) |
| 0424 | histidine-tRNA ligase (hisS) [6.1.1.21] |
| 0425 | Protein |
| 0426 | starvation-inducible outer membrane lipoprotein |
| 0427 | Long-chain-fatty-acid--CoA ligase (Long-chain acyl-CoAsynthetase) (fadD) [6.2.1.3] |
| 0428 | Protein |
| 0429 | NADH pyrophosphatase (MutT) [3.6.1.—] |
| 0430 | Protein HI0433 (ORFG) |
| 0431 | Competence protein F (DNA transformation protein comF) (ProteinCOM101A) (comF) |
| 0432 | Competence protein E precursor (DNA transformation protein comE) (comE) |
| 0433 | hypothetical protein |
| 0434 | Competence protein D (DNA transformation protein comD) (comD) |
| 0435 | Competence protein C (DNA transformation protein comC) (comC) |
| 0436 | Competence protein B (DNA transformation protein comB) (comB) |
| 0437 | Competence protein A (DNA transformation protein comA) (comA) |
| 0438 | penicillin-binding protein 1A (ponA) [2.4.2.—] |
| 0439 | Protein HI0441 (ORFJ) |
| 0440 | hypothetical protein |
| 0441 | conserved hypothetical protein TIGR00103 |
| 0442 | recombination protein RecR (recR) |
| 0443 | DNA topoisomerase III (topB) [5.99.1.2] |
| 0444 | Protein-export membrane protein secG (secG) |
| 0445 | CP4-57 integrase-like protein |
| 0446 | phage phi-R73 primase-like protein [2.7.7.—] |
| 0447 | conserved hypothetical protein |
| 0448 | conserved hypothetical protein |
| 0449 | hypothetical protein |
| 0450 | hypothetical protein |
| 0451 | conserved hypothetical protein |
| 0452 | conserved hypothetical protein |
| 0453 | conserved hypothetical protein |
| 0454 | phage-related protein |
| 0455 | conserved hypothetical protein |
| 0456 | hypothetical protein |
| 0457 | conserved hypothetical protein |
| 0458 | phage terminase, large subunit, putative |
| 0459 | phage terminase, small subunit, putative, P27 family |
| 0460 | phage phi-105 holin-like protein |
| 0461 | Phage QLRG family, putative DNA packaging |
| 0462 | phage head-tail adaptor, putative |
| 0463 | phage portal protein, HK97 family |
| 0464 | Caudovirus prohead protease |
| 0465 | phage major capsid protein, HK97 family |
| 0466 | PTS system, fructose-specific IIBC component (EIIBC-Fru) (Fructose-permease IIBC component) |
| | (Phosphotransferase enzyme II, BC component)(EC 2.7.1.69) (EII-Fru) (fruA) [2.7.1.69] |
| 0467 | 1-phosphofructokinase (Fructose 1-phosphate kinase) (fruK) [2.7.1.56] |
| 0468 | PTS system, fructose-specific IIA/FPr component (EIIA-Fru) (Fructose-permease IIA/FPr component) |
| | (Phosphotransferase enzyme II, A/FPrcomponent) (Phosphotransferase FPr protein) (Pseudo-HPr) (EIII-Fru) |
| | (Fructose PTS diphosphoryl transfer protein) (P17127) [2.7.1.69] |
| 0469 | lipoprotein, putative |
| 0470 | Virulence-associated protein D (vapD) |
| 0471 | Virulence-associated protein D (vapD) |
| 0472 | conserved hypothetical protein |
| 0473 | CBS domain protein (AF212041) |
| 0474 | Protein of unknown function (DUF1523) superfamily |
| 0475 | HI0454 [3.1.21.—] |
| 0476 | DNA polymerase III, delta′ subunit (holB) [2.7.7.7] |
| 0477 | thymidylate kinase (tmk) [2.7.4.9] |
| 0478 | conserved hypothetical protein TIGR00247 |
| 0479 | conserved hypothetical protein TIGR00247 |
| 0480 | Survival protein surA homolog precursor (PPIase) [5.2.1.8] |
| 0481 | PyrR bifunctional protein [Includes: Pyrimidine operon regulatoryprotein; Uracil phosphoribosyltransferase |
| | (UPRTase)] (pyrR) [2.4.2.9] |
| 0482 | MazG protein homolog (mazG) |
| 0483 | Protein (lapB) |
| 0484 | ATP-dependent protease La (lon) [3.4.21.53] |
| 0485 | oxygen-independent coproporphyrinogen III oxidase, putative |
| 0486 | ribose 5-phosphate isomerase A (rpiA) [5.3.1.6] |
| 0487 | D-3-phosphoglycerate dehydrogenase (PGDH) (serA) [1.1.1.95] |
| 0488 | Predicted aminomethyltransferase |
| 0489 | conserved hypothetical protein TIGR00255 |
| 0490 | ATP phosphoribosyltransferase (hisG) [2.4.2.17] |
| 0491 | hypothetical protein |
| 0492 | ATP phosphoribosyltransferase (hisG) [2.4.2.17] |
| 0493 | histidinol dehydrogenase (hisD) [1.1.1.23] |
| 0494 | histidinol-phosphate aminotransferase (hisC) [2.6.1.9] |
| 0495 | Histidine biosynthesis bifunctional protein hisB [Includes:Histidinol-phosphatase; Imidazoleglycerol- |
| | phosphatedehydratase (EC 4.2.1.19) (IGPD)] [3.1.3.15] |
| 0496 | imidazole glycerol phosphate synthase, glutamine amidotransferase subunit (hisH) [2.4.2.—] |
| 0497 | phosphoribosylformimino-5-aminoimidazole carboxamide ribotide isomerase (hisA) [5.3.1.16] |
| 0498 | imidazoleglycerol phosphate synthase, cyclase subunit (hisF) |
| 0499 | Histidine biosynthesis bifunctional protein hisIE [Includes:Phosphoribosyl-AMP cyclohydrolase (PRA- |
| | CH); Phosphoribosyl-ATP pyrophosphatase (EC 3.6.1.31) (PRA-PH)] (PRA-CH) [3.5.4.19] |
| 0500 | Tyrosine-specific transport protein 1 (Tyrosine permease 1) (tyrP) |
| 0501 | ATP synthase F1, epsilon subunit (atpC) [3.6.3.14] |
| 0502 | ATP synthase F1, beta subunit (atpD) [3.6.3.14] |
| 0503 | ATP synthase F1, gamma subunit (atpG) [3.6.3.14] |
| 0504 | ATP synthase F1, alpha subunit (atpA) [3.6.3.14] |
| 0505 | ATP synthase F1, delta subunit (atpH) [3.6.3.14] |
| 0506 | ATP synthase F0, B subunit (atpF) [3.6.3.14] |
| 0507 | ATP synthase C chain (Lipid-binding protein)(Dicyclohexylcarbodiimide-binding protein) (atpE) [3.6.3.14] |
| 0508 | ATP synthase F0, A subunit (atpB) [3.6.3.14] |
| 0509 | conserved hypothetical protein |
| 0510 | methyltransferase GidB (gidB) |
| 0511 | conserved hypothetical protein |
| 0512 | CbbY family protein VCA0662 |
| 0513 | predicted membrane protein |
| 0514 | autoinducer-2 production protein LuxS (luxS) |
| 0515 | transposase |
| 0516 | HAD superfamily (subfamily IIIB) phosphatase, TIGR01672 (AphA) [3.1.3.—] |
| 0517 | heat shock protein (hslV) [3.4.25.—] |
| 0518 | heat shock protein HslVU, ATPase subunit HslU (hslU) |
| 0519 | spermidine/putrescine-binding protein 2 precursor (potD) |
| 0520 | OrdL [1.—.—.—] |
| 0521 | DNA recombination protein rmuC homolog (YIGN) |
| 0522 | High affinity ribose transport protein rbsD (rbsD) |
| 0523 | Ribose transport ATP-binding protein rbsA (rbsA) |
| 0524 | Ribose transport system permease protein rbsC (rbsC) |
| 0525 | D-ribose-binding periplasmic protein precursor (rbsB) |
| 0526 | ribokinase (rbsK) [2.7.1.15] |
| 0527 | rbs repressor homolog (rbsR) |
| 0528 | conserved hypothetical protein TIGR00645 |
| 0529 | protein of unknown function, TIGR01935 |
| 0530 | 1,4-dihydroxy-2-naphthoate octaprenyltransferase (menA) [2.5.—.—] |
| 0531 | Protein rcsF (orf3) |
| 0532 | Tellurite resistance protein tehA homolog (tehA) |
| 0533 | DNA-directed RNA polymerase beta′ chain (RNAP beta′subunit) (Transcriptase beta′ chain) (RNA polymerase beta′ |
| | subunit) (rpoC) [2.7.7.6] |
| 0534 | DNA-directed RNA polymerase, beta subunit (rpoB) [2.7.7.6] |
| 0535 | ribosomal protein L1 (rplA) |
| 0536 | ribosomal protein L11 (rplK) |
| 0537 | purine nucleoside phosphorylase (deoD) [2.4.2.1] |
| 0538 | NupC family protein VC2352 |
| 0539 | NupC family protein VC2352 (nupC) |
| 0540 | Pyruvate-formate lyase-activating enzyme |
| 0541 | Protein |
| 0542 | ADP-heptose--lipooligosaccharide heptosyltransferase III (RFAF) |
| 0543 | Uncharacterized BCR, YitT family COG1284 subfamily, putative |
| 0544 | fructose-bisphosphate aldolase, class II (fbaA) [4.1.2.13] |
| 0545 | phosphoglycerate kinase (pgk) [2.7.2.3] |
| 0546 | unnamed protein product; Some similarities with ribonuclease |
| 0547 | ferredoxin (fdx) |
| 0548 | Tyrosine-specific transport protein 2 (Tyrosine permease 2) (tyrP) |
| 0549 | thymidine kinase |
| 0550 | Gcp (gcp) [3.4.24.57] |
| 0551 | ribosomal protein S21 (rpsU) |
| 0552 | DNA primase (dnaG) [2.7.7.—] |
| 0553 | RNA polymerase sigma factor rpoD (Sigma-70) (rpoD) |
| 0554 | aspartate ammonia-lyase (aspA) [4.3.1.1] |
| 0555 | Urease accessory protein ureH (ureH) |
| 0556 | urease accessory protein UreG (ureG) |
| 0557 | Urease accessory protein ureF (ureF) |
| 0558 | Urease accessory protein ureE (ureE) |
| 0559 | urease, alpha subunit (ureC) [3.5.1.5] |
| 0560 | urease, beta subunit (ureB) [3.5.1.5] |
| 0561 | urease, gamma subunit (ureA) [3.5.1.5] |
| 0562 | chaperonin, 10 kDa (groES) |
| 0563 | 60 kDa chaperonin (Protein Cpn60) (groEL protein) (groEL) |
| 0564 | ribosomal protein L9 (rplI) |
| 0565 | ribosomal protein S18 (rpsR) |
| 0566 | Single-strand binding protein family |
| 0567 | 30S ribosomal protein (rpS6) |
| 0568 | translation initiation factor IF-1 (infA) |
| 0569 | Lipooligosaccharide biosynthesis protein lic2B [2.—.—.—] |
| 0570 | LgtG |
| 0571 | dimethyladenosine transferase (ksgA) [2.1.1.—] |
| 0572 | lipopolysaccharide core [2.—.—.—] |
| 0573 | bis(5′-nucleosyl)-tetraphosphatase (symmetrical) [3.6.1.41] |
| 0574 | conserved hypothetical protein |
| 0575 | 6-phosphogluconate dehydrogenase, decarboxylating (gnd) [1.1.1.44] |
| 0576 | conserved hypothetical protein |
| 0577 | hypothetical protein |
| 0578 | integral membrane protein |
| 0579 | 6-phosphogluconolactonase (pgl) [3.1.1.31] |
| 0580 | glucose-6-phosphate 1-dehydrogenase (zwf) [1.1.1.49] |
| 0581 | 3′(2′)5′-bisphosphate nucleotidase (cysQ) [3.1.3.7] |
| 0582 | conserved hypothetical protein |
| 0583 | oligopeptide transporter, OPT family |
| 0584 | Heat shock protein 15 homolog (HSP15) (HSP15) |
| 0585 | Regulatory protein asnC (asnC) |
| 0586 | aspartate--ammonia ligase (asnA) [6.3.1.1] |
| 0587 | phosphoglycolate phosphatase, bacterial (gph) [3.1.3.18] |
| 0588 | ribulose-phosphate 3-epimerase (rpe) [5.1.3.1] |
| 0589 | DNA gyrase, B subunit (gyrB) [5.99.1.3] |
| 0590 | hypothetical protein |
| 0591 | transcription accessory protein tex homolog (tex) |
| 0592 | transcription elongation factor GreB (greB) |
| 0593 | possible tetR family transcriptional regulator |
| 0594 | Hydrogen peroxide-inducible genes activator (oxyR) |
| 0595 | Protein [1.11.1.—] |
| 0596 | Protein slyX homolog-related protein |
| 0597 | SlyD (fkpA) [5.2.1.8] |
| 0598 | Uncharacterized protein conserved in bacteria |
| 0599 | Intracellular sulfur oxidation protein dsrE |
| 0600 | DsrF family protein |
| 0601 | conserved hypothetical protein |
| 0602 | translation elongation factor Tu (tuf) |
| 0603 | translation elongation factor G (fusA) |
| 0604 | ribosomal protein S7 (rpsG) |
| 0605 | ribosomal protein S12 (rpsL) |
| 0606 | glucose-inHIBited division protein A (gidA) |
| 0607 | 2′,3′-cyclic-nucleotide 2′-phosphodiesterase (cpdB) [3.1.4.16] |
| 0608 | Aminobenzoyl-glutamate utilizaion protein A homolog [3.5.—.—] |
| 0609 | c4-dicarboxylate anaerobic carrier family protein subfamily |
| 0610 | peptidase E homolog (pepE) [3.4.13.21] |
| 0611 | Positive regulator of sigma(E), RseC/MucC superfamily |
| 0612 | Putrescine-ornithine antiporter (Putrescine transport protein) (potE) |
| 0613 | Ornithine decarboxylase (speF) [4.1.1.17] |
| 0614 | transcription regulator azlB (lrp) |
| 0615 | Transporter |
| 0616 | carbamate kinase (arcC) [2.7.2.2] |
| 0617 | ornithine carbamoyltransferase (argF) [2.1.3.3] |
| 0618 | predicted hydrolase (YIGL) |
| 0619 | crcB protein (crcB) |
| 0620 | regulatory protein RecX (recX) |
| 0621 | recA protein (recA) |
| 0622 | TfoX (tfoX) |
| 0623 | translation elongation factor Tu (tuf) |
| 0624 | PsiE protein homolog |
| 0625 | hemY protein (hemY) |
| 0626 | Protein (hemX) [2.1.1.107] |
| 0627 | adenylate cyclase, class-I (cyaA) [4.6.1.1] |
| 0628 | Glycerol-3-phosphate dehydrogenase [NAD(P)+] (NAD(P)H-dependent glycerol-3-phosphate dehydrogenase) |
| | (gpsA) [1.1.1.94] |
| 0629 | Serine acetyltransferase (SAT) (cysE) [2.3.1.30] |
| 0630 | shikimate 5-dehydrogenase/quinate 5-dehydrogenase family protein (aroe) [1.1.1.25] |
| 0631 | unnamed protein product; Similar to sodium:sulfate symporter-family protein (huNaDC) |
| 0632 | methylenetetrahydrofolate dehydrogenase (NADP)/methenyltetrahydrofolate cyclohydrolase (EC |
| | 3.5.4.9) (folD) [1.5.1.5] |
| 0633 | L-fucose permease (fucP) |
| 0634 | L-fuculose phosphate aldolase (fucA) [4.1.2.17] |
| 0635 | Fucose operon fucU protein (fucU) |
| 0636 | L-fuculokinase (L-fuculose kinase) (fucK) [2.7.1.51] |
| 0637 | L-fucose isomerase (fucl) [5.3.1.25] |
| 0638 | L-fucose operon activator (fucR) |
| 0639 | RNA polymerase associated protein rapA (ATP-dependenthelicase hepA) (hepA) [3.6.1.—] |
| 0640 | Ribosomal large subunit pseudouridine synthase A(Pseudouridylate synthase) (Uracil hydrolyase) [4.2.1.70] |
| 0641 | Protein glpG homolog [3.4.21.—] |
| 0642 | Glycerol-3-phosphate regulon repressor (glpR) |
| 0643 | 28 3 kDa membrane protein (hlpA) |
| 0644 | D-methionine transport system permease protein Metl (membrane) |
| 0645 | D-methionine transport ATP-binding protein MetN (atp_bind) |
| 0646 | histidinol phosphatase |
| 0647 | peptide deformylase (def) [3.5.1.88] |
| 0648 | methionyl-tRNA formyltransferase (fmt) [2.1.2.9] |
| 0649 | sun protein (sun) [2.1.1.—] |
| 0650 | Trk system potassium uptake protein trkA (K(+)-uptake protein trkA) (trkA) |
| 0651 | large conductance mechanosensitive channel protein (mscL) |
| 0652 | Uncharacterized conserved protein |
| 0653 | RNA polymerase sigma-E factor (Sigma-24) (rpoE) |
| 0654 | Sigma-E factor negative regulatory protein homolog (mclA) |
| 0655 | Sigma-E factor regulatory protein rseB homolog precursor (rseB) |
| 0656 | pantothenate kinase (coaA) [2.7.1.33] |
| 0657 | translation elongation factor EF-Tu (tufB) |
| 0658 | translation elongation factor EF-Tu (tufB) |
| 0659 | translation elongation factor EF-Tu (tufB) |
| 0660 | conserved hypothetical protein |
| 0661 | hypothetical protein |
| 0662 | conserved hypothetical protein |
| 0663 | tRNA-dihydrouridine synthase A [1.—.—.—] |
| 0664 | C4-dicarboxylate transport protein homolog b2343 |
| 0665 | tryptophanyl-tRNA synthetase (trpS) [6.1.1.2] |
| 0666 | uncharacterized protein conserved in bacteria |
| 0667 | adenylosuccinate lyase (purB) [4.3.2.2] |
| 0668 | ribosomal protein (rpL10) |
| 0669 | ribosomal protein L7/L12 (rplL) |
| 0670 | UDP-N-acetylglucosamine pyrophosphorylase (glmU) [2.7.7.23] |
| 0671 | conserved hypothetical protein |
| 0672 | PldB (pldB) [3.1.1.5] |
| 0673 | aspartate-semialdehyde dehydrogenase (asd) [1.2.1.11] |
| 0674 | Membrane protein, MgtC/SapB family |
| 0675 | Fe—S oxidoreductase [1.8.—.—] |
| 0676 | drug activity modulator B (mdaB) [1.6.99.—] |
| 0677 | ATP-dependent DNA helicase Rep (rep) [3.6.1.—] |
| 0678 | Protein of unknown function (DUF1375) superfamily |
| 0679 | pantetheine-phosphate adenylyltransferase (coaD) [2.7.7.3] |
| 0680 | 3-deoxy-D-manno-octulosonic-acid transferase (KDOtransferase) (kdtA) [2.—.—.—] |
| 0681 | UDP-glucose--Lipooligosaccharide beta 1-4 glucosyltransferase [2.—.—.—] |
| 0682 | DNA-3-methyladenine glycosylase (3-methyladenine-DNAglycosidase) (TAG) (tagI) [3.2.2.20] |
| 0683 | hypothetical protein |
| 0684 | shikimate 5-dehydrogenase (aroE) [1.1.1.25] |
| 0685 | Protein (SUA5) |
| 0686 | DNA topoisomerase (topA) [5.99.1.2] |
| 0687 | ATPase components of ABC transporters with duplicated ATPase domains |
| 0688 | Predicted transcriptional regulators |
| 0689 | conserved hypothetical protein |
| 0690 | Hemoglobin and hemoglobin-haptoglobin binding protein B precursor |
| 0691 | CydD (cydD) |
| 0692 | ABC transporter, ATP-binding/permease protein |
| 0693 | conserved hypothetical protein |
| 0694 | conserved hypothetical protein |
| 0695 | conserved hypothetical protein |
| 0696 | Putative HTH-type transcriptional regulator HI0666.1 |
| 0697 | fructose-1,6-bisphosphatase, class II (glpX) [3.1.3.11] |
| 0698 | uncharacterized protein conserved in bacteria |
| 0699 | Protein mioC homolog (mioC) [1.8.1.2] |
| 0700 | D-tyrosyl-tRNA(Tyr) deacylase (dtd) [3.1.—.—] |
| 0701 | 2C-methyl-D-erythritol 2,4-cyclodiphosphate synthase (ispF) [4.6.1.12] |
| 0702 | 2-C-methyl-D-erythritol 4-phosphate cytidylyltransferase (ispD) [2.7.7.60] |
| 0703 | Cell division protein ftsB homolog |
| 0704 | Xanthine-guanine phosphoribosyltransferase (XGPRT) (gptB) [2.4.2.22] |
| 0705 | X-His dipeptidase (pepD) [3.4.13.3] |
| 0706 | tyrosine recombinase XerC (xerC) |
| 0707 | acetyltransferase, GNAT family |
| 0708 | triosephosphate isomerase (tplA) [5.3.1.1] |
| 0709 | Thiosulfate sulfurtransferase glpE (glpE) [2.8.1.1] |
| 0710 | rarD protein (rarD) |
| 0711 | HTH-type transcriptional activator ilvY (ilvY) |
| 0712 | hypothetical protein |
| 0713 | ketol-acid reductoisomerase (ilvC) [1.1.1.86] |
| 0714 | Anaerobic glycerol-3-phosphate dehydrogenase subunit C (G-3-Pdehydrogenase) (glpC) [1.1.99.5] |
| 0715 | Anaerobic glycerol-3-phosphate dehydrogenase subunit B(Anaerobic G-3-P dehydrogenase subunit B) (Anaerobic |
| | G3Pdhase B) (glpB) [1.1.99.5] |
| 0716 | Anaerobic glycerol-3-phosphate dehydrogenase subunit A(G-3-P dehydrogenase) (glpA) [1.1.99.5] |
| 0717 | glycerol-3-phosphate transporter (glpT) |
| 0718 | glycerophosphodiester phosphodiesterase precursor (glpQ) [3.1.4.46] |
| 0719 | Glycerol uptake facilitator protein (glpF) |
| 0720 | glycerol kinase (glpK) [2.7.1.30] |
| 0721 | Xanthine-guanine phosphoribosyltransferase (XGPRT) (gptB) [2.4.2.22] |
| 0722 | glycerophosphodiester phosphodiesterase (glpQ) [3.1.4.46] |
| 0723 | 5′-nucleotidase, lipoprotein e(P4) family |
| 0724 | Ribosomal large subunit pseudouridine synthase E(Pseudouridylate synthase) (Uracil hydrolyase) [4.2.1.70] |
| 0725 | exopolyphosphatase [3.6.1.11] |
| 0726 | Protein |
| 0727 | Protein HI0698 precursor |
| 0728 | FKBP-type peptidyl-prolyl cis-trans isomerase slyD(PPiase) (Rotamase) (slyD) [5.2.1.8] |
| 0729 | Protein |
| 0730 | conserved hypothetical protein TIGR00094 |
| 0731 | acid phosphatase SurE (surE) [3.1.3.2] |
| 0732 | LppB (lppB) |
| 0733 | Outer membrane antigenic lipoprotein B precursor |
| 0734 | Outer membrane antigenic lipoprotein B precursor |
| 0735 | Tryptophanase (L-tryptophan indole-lyase) (TNase) (TNase) [4.1.99.1] |
| 0736 | TnaB (mtr) |
| 0737 | DNA mismatch repair protein MutS (mutS) |
| 0738 | L-seryl-tRNA selenium transferase (selA) [2.9.1.1] |
| 0739 | selenocysteine-specific translation elongation factor (selB) |
| 0740 | lipoprotein, putative |
| 0741 | negative regulator of translation |
| 0742 | conserved hypothetical protein TIGR00053 |
| 0743 | Hemoglobin and hemoglobin-haptoglobin binding protein C precursor |
| 0744 | PT repeat family |
| 0745 | trigger factor (tig) [5.2.1.8] |
| 0746 | ATP-dependent Clp protease, proteolytic subunit ClpP (clpP) [3.4.21.92] |
| 0747 | ATP-dependent Clp protease, ATP-binding subunit ClpX (clpX) |
| 0748 | Preprotein translocase secE subunit (secE) |
| 0749 | transcription termination/antitermination factor NusG (nusG) |
| 0750 | VacJ lipoprotein homolog precursor (vacJ) |
| 0751 | endoribonuclease L-PSP, putative |
| 0752 | hypothetical protein |
| 0753 | protease HtpX (heat shock protein) (htpX) [3.4.24.—] |
| 0754 | Predicted redox protein, regulator of disulfide bond formation |
| 0755 | conserved hypothetical protein TIGR00257 |
| 0756 | Trk system potassium uptake protein trkH (trkH) |
| 0757 | Hypothetical UPF0241 protein |
| 0758 | conserved hypothetical protein |
| 0759 | Nitrate/nitrite response regulator protein homolog (narP) |
| 0760 | diaminopimelate decarboxylase (lysA) [4.1.1.20] |
| 0761 | lipoprotein, putative |
| 0762 | CyaY protein (cyaY) |
| 0763 | ATP-dependent DNA helicase RecQ (recQ) [3.6.1.—] |
| 0764 | prolyl-tRNA synthetase (proS) [6.1.1.15] |
| 0765 | Organic solvent tolerance protein precursor |
| 0766 | Protein sufI homolog precursor (sufI) |
| 0767 | 1-acyl-sn-glycerol-3-phosphate acyltransferase (1-AGPacyltransferase) (1-AGPAT) (Lysophosphatidic acid |
| | acyltransferase)(LPAAT) (plsC) [2.3.1.51] |
| 0768 | UDP-2,3-diacylglucosamine hydrolase (lpxH) [3.6.1.—] |
| 0769 | sodium- and chloride-dependent transporter NMB1975 (SNF) |
| 0770 | IlvG (ALS-II) [4.1.3.18] |
| 0771 | Na+-dependent transporters of the SNF family (SNF) |
| 0772 | IlvG (ILVG) [4.1.3.18] |
| 0773 | dihydroxy-acid dehydratase (ilvD) [4.2.1.9] |
| 0774 | threonine ammonia-lyase, biosynthetic (ilvA) [4.3.1.19] |
| 0775 | DNA polymerase III alpha subunit (dnaE) [2.7.7.7] |
| 0776 | hypothetical protein |
| 0777 | YhxB (cpsG) [5.4.2.8] |
| 0778 | protein-export protein SecB (secB) |
| 0779 | rhodanese domain protein |
| 0780 | L-asparaginase II (ansB) [3.5.1.1] |
| 0781 | L-asparaginase II (ansB) [3.5.1.1] |
| 0782 | Anaerobic C4-dicarboxylate transporter dcuB (dcuB) |
| 0783 | NADH dehydrogenase (ndh) [1.6.99.3] |
| 0784 | Glycerol-3-phosphate acyltransferase (GPAT) (plsB) [2.3.1.15] |
| 0785 | LexA repressor (lexA) [3.4.21.88] |
| 0786 | diaminopimelate epimerase (dapF) [5.1.1.7] |
| 0787 | thiol peroxidase (tpx) [1.11.1.—] |
| 0788 | phosphoribosylformylglycinamidine synthase (purL) [6.3.5.3] |
| 0789 | Lex2A |
| 0790 | Lex2B (lex2B) [2.—.—.—] |
| 0791 | yibQ gene product |
| 0792 | M23/M37 peptidase domain protein protein |
| 0793 | 2,3-bisphosphoglycerate-dependent phosphoglycerate mutase(Phosphoglyceromutase) (PGAM) (BPG-dependent |
| | PGAM) (dPGM) (gpmA) [5.4.2.1] |
| 0794 | ribosomal protein L31 (rpmE) |
| 0795 | hypothetical protein |
| 0796 | A/G-specific adenine glycosylase (mutY) [3.2.2.—] |
| 0797 | UPF0269 protein |
| 0798 | Membrane-bound lytic murein transglycosylase C precursor(Murein hydrolase C) (mltC) [3.2.1.—] |
| 0799 | Ser/Thr protein phosphatase superfamily |
| 0800 | nicotinamide-nucleotide adenylyltransferase [2.7.7.1] |
| 0801 | hypothetical protein |
| 0802 | 3,4-dihydroxy-2-butanone 4-phosphate synthase (ribB) |
| 0803 | Lipooligosaccharide biosynthesis protein lpsA [2.—.—.—] |
| 0804 | RNA methyltransferase, TrmH family, group 2 |
| 0805 | methyltransferase, putative |
| 0806 | Cell division protein ftsY homolog (ftsY) |
| 0807 | Cell division ATP-binding protein ftsE (ftsE) |
| 0808 | putative protein insertion permease FtsX (ftsX) |
| 0809 | Acetyl-CoA acetyltransferase (Acetoacetyl-CoA thiolase) (atoB) [2.3.1.9] |
| 0810 | membrane protein, putative |
| 0811 | Acetate CoA-transferase beta subunit (Acetyl-CoA:acetoacetate CoA transferase beta subunit) (atoA) [2.8.3.8] |
| 0812 | Acetate CoA-transferase alpha subunit (Acetyl-CoA:acetoacetate CoA transferase alpha subunit) [2.8.3.8] |
| 0813 | Putative HTH-type transcriptional regulator |
| 0814 | ribosomal protein S10 (rpsJ) |
| 0815 | ribosomal protein L3 (rplC) |
| 0816 | ribosomal protein L4/L1 family (rplD) |
| 0817 | ribosomal protein L23 (rplW) |
| 0818 | ribosomal protein L2 (rplB) |
| 0819 | ribosomal protein S19 (rpsS) |
| 0820 | ribosomal protein L22 (rplV) |
| 0821 | ribosomal protein S3 (rpsC) |
| 0822 | ribosomal protein L16 (rplP) |
| 0823 | ribosomal protein L29 (rpmC) |
| 0824 | ribosomal protein S17 (rpsQ) |
| 0825 | conserved hypothetical protein |
| 0826 | ribosomal protein L14 (rplN) |
| 0827 | ribosomal protein L24 (rplX) |
| 0828 | ribosomal protein (rpL5) |
| 0829 | ribosomal protein S14p/S29e (rpsN) |
| 0830 | ribosomal protein S8 (rpsH) |
| 0831 | ribosomal protein (rpL6) |
| 0832 | ribosomal protein L18 (rplR) |
| 0833 | ribosomal protein S5 (rpsE) |
| 0834 | ribosomal protein L30 (rpmD) |
| 0835 | ribosomal protein L15 (rplO) |
| 0836 | Preprotein translocase secY subunit (secY) |
| 0837 | ribosomal protein L36 (rpmJ) |
| 0838 | lipoprotein, putative |
| 0839 | ribosomal protein S13p/S18e (rpsM) |
| 0840 | 2,3-bisphosphoglycerate-dependent phosphoglycerate mutase(Phosphoglyceromutase) (PGAM) (BPG-dependent |
| | PGAM) (dPGM) (gpmA) [5.4.2.1] |
| 0841 | Preprotein translocase secY subunit (secY) |
| 0842 | ribosomal protein L36 (rpmJ) |
| 0843 | ribosomal protein S13p/S18e (rpsM) |
| 0844 | ribosomal protein S11 (rpsK) |
| 0845 | ribosomal protein (rpS4) |
| 0846 | ribosomal protein S11 (rpsK) |
| 0847 | ribosomal protein S4 (rpsD) |
| 0848 | DNA-directed RNA polymerase, alpha subunit (rpoA) [2.7.7.6] |
| 0849 | ribosomal protein L17 (rplQ) |
| 0850 | cyclic nucleotide-binding domain protein |
| 0851 | arylsulfatase regulator (YDEM) [1.—.—.—] |
| 0852 | Domain of unknown function, putative |
| 0853 | 1-deoxy-D-xylulose 5-phosphate reductoisomerase (dxr) [1.1.1.267] |
| 0854 | ribosome recycling factor (frr) |
| 0855 | phosphoenolpyruvate carboxykinase (ATP) (pckA) [4.1.1.49] |
| 0856 | 33 kDa chaperonin (Heat shock protein 33 homolog) (HSP33) (HSP33) |
| 0857 | hypothetical protein |
| 0858 | argininosuccinate lyase (argH) [4.3.2.1] |
| 0859 | UTP-glucose-1-phosphate uridylyltransferase (galU) [2.7.7.9] |
| 0860 | carbon storage regulator (csrA) |
| 0861 | alanyl-tRNA synthetase (alaS) [6.1.1.7] |
| 0862 | Universal stress protein A homolog (uspA) |
| 0863 | Xaa-Pro aminopeptidase (X-Pro aminopeptidase)(Aminopeptidase P II) (APP-II) (Aminoacylproline |
| | aminopeptidase) (pepP) [3.4.11.9] |
| 0864 | Hypothetical UPF0149 protein |
| 0865 | Aldose 1-epimerase (Mutarotase) (galM) [5.1.3.3] |
| 0866 | galactokinase (galK) [2.7.1.6] |
| 0867 | galactokinase (galK) [2.7.1.6] |
| 0868 | galactose-1-phosphate uridylyltransferase (galT) [2.7.7.10] |
| 0869 | hypothetical protein |
| 0870 | hypothetical protein |
| 0871 | galactose repressor (galR) |
| 0872 | D-galactose-binding protein (mglB) |
| 0873 | Galactoside transport ATP-binding protein mglA (mglA) |
| 0874 | Galactoside transport system permease protein mglC (mglC) |
| 0875 | membrane protein, putative |
| 0876 | intracellular septation protein A (ispZ) |
| 0877 | acyl CoA thioester hydrolase family protein NMB0925 [3.1.2.—] |
| 0878 | Protein (AB020211) |
| 0879 | Putative soluble lytic murein transglycosylase precursor [3.2.1.—] |
| 0880 | soluble lytic murein transglycosylase (Slt70) [3.2.1.—] |
| 0881 | trp operon repressor (trpR) |
| 0882 | monofunctional biosynthetic peptidoglycan transglycosylase (mtgA) [2.4.2.—] |
| 0883 | Fumarate reductase subunit D (frdD) [1.3.99.1] |
| 0884 | Fumarate reductase subunit C (frdC) [1.3.99.1] |
| 0885 | Fumarate reductase iron-sulfur protein (frdB) [1.3.99.1] |
| 0886 | fumarate reductase, flavoprotein subunit (frdA) [1.3.99.1] |
| 0887 | lysyl-tRNA synthetase-related protein GenX |
| 0888 | Transcriptional regulatory protein cpxR homolog (cpxR) |
| 0889 | small protein A |
| 0890 | 37 kDa nucleoid-associated protein homolog |
| 0891 | Protein of unknown function (DUF1414) superfamily |
| 0892 | predicted hydrolase |
| 0893 | conserved hypothetical protein |
| 0894 | molybdopterin-guanine dinucleotide biosynthesis protein A (mob) |
| 0895 | Protein yihD (o89) |
| 0896 | Thiol:disulfide interchange protein dsbA precursor (por) [5.3.4.1] |
| 0897 | Protein HI0847 (ORF3) (YIFE) |
| 0898 | tRNA (uracil-5-)-methyltransferase (trmA) [2.1.1.35] |
| 0899 | gtg start, alternate starts possible |
| 0900 | sigma-E factor regulatory protein RseC STY2830 |
| 0901 | molybdopterin-guanine dinucleotide biosynthesis protein B (mobB) |
| 0902 | drug resistance translocase family protein NMB1435 (Cereon) |
| 0903 | heme-binding lipoprotein precursor hbpA [validated] (dppA) |
| 0904 | Protein |
| 0905 | conserved protein |
| 0906 | DNA polymerase I (POL I) (polA) [2.7.7.7] |
| 0907 | Family of unknown function (DUF710) superfamily |
| 0908 | Protein |
| 0909 | ClpB protein (clpB) [3.4.21.—] |
| 0910 | RNA methyltransferase, TrmH family, group 3 |
| 0911 | ribonuclease R (rnr) [3.1.—.—] |
| 0912 | conserved hypothetical integral membrane protein subfamily |
| 0913 | pyridoxamine 5′-phosphate oxidase (pdxH) [1.4.3.5] |
| 0914 | GTP-binding protein TypA (typA) |
| 0915 | glutamine synthetase, type I (glnA) [6.3.1.2] |
| 0916 | Wzz homolog (WZZE) |
| 0917 | conserved hypothetical protein |
| 0918 | glycosyl transferase, group 2 family protein (partial) [2.—.—.—] |
| 0919 | HIO869 |
| 0920 | membrane protein, putative |
| 0921 | HIO871 |
| 0922 | HIO872 (rfbP) [2.—.—.—] |
| 0923 | dTDP-glucose 4,6-dehydratase (rfbB) [4.2.1.46] |
| 0924 | O-Antigen Polymerase family |
| 0925 | 3.4.11.23 (pepA) [3.4.11.23] |
| 0926 | Nucleoside diphosphate kinase (NDK) (NDP kinase)(Nucleoside-2-P kinase) (ndk) [2.7.4.6] |
| 0927 | GTP1/Obg family protein (F390) |
| 0928 | Hypothetical transport protein |
| 0929 | ribosomal protein L27 (rpmA) |
| 0930 | ribosomal protein L21 (rplU) |
| 0931 | Octaprenyl-diphosphate synthase (Octaprenyl pyrophosphatesynthetase) (OPP synthetase) (ispB) [2.5.1.—] |
| 0932 | Protein |
| 0933 | Na(+)-linked D-alanine glycine permease (alanine) |
| 0934 | Aerobic respiration control protein arcA homolog (arcA) |
| 0935 | Thiol:disulfide interchange protein dsbD precursor(Protein-disulfide reductase) (Disulfide reductase) (C-type |
| | cytochromebiogenesis protein cycZ) (dsbD) [1.8.1.8] |
| 0936 | DoxD-like family |
| 0937 | bifunctional purine biosynthesis protein PurH (purH) |
| 0938 | phosphoribosylamine--glycine ligase (purD) [6.3.4.13] |
| 0939 | serine hydroxymethyltransferase (glyA) [2.1.2.1] |
| 0940 | dephospho-CoA kinase (coaE) [2.7.1.24] |
| 0941 | Domain of unknown function (DUF329) superfamily |
| 0942 | 3.6.1.—(rhlB) [3.6.1.—] |
| 0943 | transcriptional regulator (Bm3R1) |
| 0944 | membrane-fusion protein |
| 0945 | AcrB (acrB) |
| 0946 | cell division protein FtsN (ftsN) |
| 0947 | Multidrug resistance protein B homolog (emrB) |
| 0948 | Multidrug resistance protein A homolog (emrA) |
| 0949 | dihydrofolate reductase (folA) [1.5.1.3] |
| 0950 | glutamate 5-kinase (proB) [2.7.2.11] |
| 0951 | (Di)nucleoside polyphosphate hydrolase (invA) [3.6.1.—] |
| 0952 | Predicted permease |
| 0953 | prolipoprotein diacylglyceryl transferase (lgt) [2.4.99.—] |
| 0954 | thymidylate synthase (thyA) [2.1.1.45] |
| 0955 | cytidine/deoxycytidylate deaminase family protein |
| 0956 | conserved hypothetical protein |
| 0957 | conserved hypothetical protein |
| 0958 | preprotein translocase, SecA subunit (secA) |
| 0959 | Mutator mutT protein (7,8-dihydro-8-oxoguanine-triphosphatase)(8-oxo-dGTPase) (dGTP pyrophosphohydrolase) |
| | (mutT) [3.6.1.—] |
| 0960 | Glutathione-regulated potassium-efflux system protein (K(+)/H(+)antiporter) (kefC) |
| 0961 | possible ubiquinone/menaquinone biosynthesis methyltransferase [2.1.1.—] |
| 0962 | ribosomal protein S2 (rpsB) |
| 0963 | translation elongation factor Ts (tsf) |
| 0964 | UDP-3-O-[3-hydroxymyristoyl] glucosamine N-acyltransferase (lpxD) [2.3.1.—] |
| 0965 | Outer membrane protein 26 precursor |
| 0966 | Protective surface antigen D15 precursor (80 kDa D15 antigen)(D-15-Ag) (Outer membrane protein D15) (D15) |
| 0967 | membrane-associated zinc metalloprotease, putative |
| 0968 | phosphatidate cytidylyltransferase (cdsA) [2.7.7.41] |
| 0969 | undecaprenyl diphosphate synthase (uppS) [2.5.1.31] |
| 0970 | leucyl-tRNA synthetase (leuS) [6.1.1.4] |
| 0971 | possible rare lipoprotein B (rlpB) |
| 0972 | DNA polymerase III, delta subunit (holA) [2.7.7.7] |
| 0973 | hypothetical protein |
| 0974 | Eag0007 (AF269166) |
| 0975 | unnamed protein product; Highly similar to stability protein StbD of Morganella morganii |
| 0976 | hypothetical protein |
| 0977 | Fels-2 prophage protein |
| 0978 | glycyl-tRNA synthetase, beta subunit (glyS) [6.1.1.14] |
| 0979 | similar to E. coli ORF, encoded by GenBank Accession Number X97282; and to H. influenzae protein HI0925, |
| | encoded by GenBank Accession Number U32774; and to H. influenzae protein HI1162, encoded by GenBank |
| | Accession Number U32796 |
| 0980 | conserved hypothetical protein |
| 0981 | glycyl-tRNA synthetase, alpha subunit (glyQ) [6.1.1.14] |
| 0982 | Catalase (hktE) [1.11.1.6] |
| 0983 | synthetase/amidase (orfa) |
| 0984 | lipoprotein, putative |
| 0985 | conserved hypothetical protein |
| 0986 | enolase (eno) [4.2.1.11] |
| 0987 | conserved hypothetical protein TIGR00275 |
| 0988 | Formate-dependent nitrite reductase complex nrfFG subunit precursor (nrfF) |
| 0989 | thiol:disulfide interchange protein DsbE (dsbE) |
| 0990 | cytochrome c-type biogenesis protein CcmF (ccmF) |
| 0991 | inositol-1-monophosphatase (IMPase) (inositol-1-phosphatase) (i-1-Pase) (suhB) [3.1.3.25] |
| 0992 | conserved hypothetical protein |
| 0993 | conserved hypothetical protein |
| 0994 | conserved hypothetical protein |
| 0995 | conserved hypothetical protein |
| 0996 | exodeoxyribonuclease V, gamma subunit (recC) [3.1.11.5] |
| 0997 | conserved hypothetical protein TIGR00244 |
| 0998 | riboflavin biosynthesis protein RibD (ribD) |
| 0999 | periplasmic serine protease DegS (degS) [3.4.21.—] |
| 1000 | formamidopyrimidine-DNA glycosylase (mutM) [3.2.2.23] |
| 1001 | L-2,4-diaminobutyrate decarboxylase (DABA decarboxylase)(DABA-DC) [4.1.1.—] |
| 1002 | PIN (PilT N terminus) domain (vapC) |
| 1003 | possible virulence-associated protein (vapB) |
| 1004 | Diaminobutyrate--2-oxoglutarate aminotransferase (L-diaminobutyric acid transaminase) (Diaminobutyrate |
| | transaminase) (DABAaminotransferase) (DABA-AT) (L-2,4-diaminobutyrate:2-ketoglutarate 4-aminotransferase) |
| | (DABA-AT) [2.6.1.76] |
| 1005 | ribosomal protein L33 (rpmG) |
| 1006 | ribosomal protein-related protein |
| 1007 | DNA repair protein radC homolog (radC) |
| 1008 | phosphopantothenoylcysteine decarboxylase/phosphopantothenate--cysteine ligase (coaBC) |
| 1009 | Deoxyuridine 5′-triphosphate nucleotidohydrolase(dUTPase) (dUTP pyrophosphatase) (dut) [3.6.1.23] |
| 1010 | Ttk protein homolog (ttk) |
| 1011 | Uncharacterised protein family (UPF0270) family |
| 1012 | Catabolite gene activator (cAMP receptor protein) (cAMP-regulatoryprotein) (crp) |
| 1013 | 23S rRNA (uracil-5-)-methyltransferase RumB (rumB) [2.1.1.—] |
| 1014 | Beta-hexosaminidase (N-acetyl-beta-glucosaminidase)(Beta-N-acetylhexosaminidase) (exoII) [3.2.1.52] |
| 1015 | lipoprotein, putative |
| 1016 | histidine triad protein homolog (Ap4A) |
| 1017 | isoleucyl-tRNA synthetase (ileS) [6.1.1.5] |
| 1018 | riboflavin biosynthesis protein RibF (ribF) |
| 1019 | integral membrane protein MviN (mviN) |
| 1020 | ribosomal protein S20 (rpsT) |
| 1021 | conserved hypothetical protein |
| 1022 | naphthoate synthase (menB) [4.1.3.36] |
| 1023 | o-succinylbenzoic acid (OSB) synthetase (menC) [4.2.1.—] |
| 1024 | 3-dehydroquinate dehydratase, type II (aroQ) [4.2.1.10] |
| 1025 | acetyl-CoA carboxylase, biotin carboxyl carrier protein (accB) |
| 1026 | acetyl-CoA carboxylase, biotin carboxylase (accC) [6.4.1.2] |
| 1027 | Eag0010 |
| 1028 | Protein of unknown function (DUF560) family |
| 1029 | Sodium/pantothenate symporter |
| 1030 | sodium/pantothenate symporter (panF) |
| 1031 | Tou6 (DMT) |
| 1032 | cell filamentation protein (fic) |
| 1033 | ribosomal protein L11 methyltransferase (prmA) [2.1.1.—] |
| 1034 | tRNA-dihydrouridine synthase B (nifR3) [1.—.—.—] |
| 1035 | DNA-binding protein fis (fis) |
| 1036 | SsrA-binding protein (smpB) |
| 1037 | Phosphofructokinase |
| 1038 | lipoprotein, putative |
| 1039 | UPF0246 protein yaaA (ECO110K) |
| 1040 | Smf protein (DNA processing chain A) (dprA) |
| 1041 | 2-isopropylmalate synthase (leuA) [2.3.3.13] |
| 1042 | 3-isopropylmalate dehydrogenase (leuB) [1.1.1.85] |
| 1043 | 3-isopropylmalate dehydratase, large subunit (leuC) [4.2.1.33] |
| 1044 | 3-isopropylmalate dehydratase, small subunit (leuD) [4.2.1.33] |
| 1045 | Immunoglobulin A1 protease precursor (IGA1 protease) (iga1) [3.4.21.72] |
| 1046 | DNA replication and repair protein recF (recF) |
| 1047 | DNA polymerase III, beta subunit (dnaN) [2.7.7.7] |
| 1048 | chromosomal replication initiator protein DnaA (dnaA) |
| 1049 | transferrin-binding protein 1 precursor (tbp1) |
| 1050 | transferrin-binding protein 2 precursor (tbp2) |
| 1051 | Protein of unknown function (DUF560) family |
| 1052 | ribosomal protein L34 (rpmH) |
| 1053 | ribonuclease P protein component (rnpA) [3.1.26.5] |
| 1054 | conserved hypothetical protein TIGR00278 |
| 1055 | Inner membrane protein oxaA |
| 1056 | tRNA modification GTPase TrmE (trmE) |
| 1057 | 5.2.1.8 [5.2.1.8] |
| 1058 | Sulfatase domain protein |
| 1059 | lipoprotein signal peptidase (IspA) [3.4.23.36] |
| 1060 | 4-hydroxy-3-methylbut-2-enyl diphosphate reductase (ispH) [1.17.1.2] |
| 1061 | hypothetical protein |
| 1062 | Protein HI1008 precursor |
| 1063 | DeoR-family trancriptional regulator STY3044 (glpR) |
| 1064 | 3-hydroxyisobutyrate dehydrogenase (TSAR) [1.1.—.—] |
| 1065 | tRNA synthase-like protein |
| 1066 | L-fuculose-1-phosphate aldolase-like protein (fucA) [4.1.2.17] |
| 1067 | hydroxypyruvate isomerase [5.3.1.22] |
| 1068 | 4-hydroxybutyrate dehydrogenase [1.1.1.61] |
| 1069 | GntP (gntP) |
| 1070 | Putative cyclase superfamily |
| 1071 | hypothetical protein |
| 1072 | glycerol uptake facilitator (glpF) |
| 1073 | protein V6 (insertion sequence IS1016) |
| 1074 | ISPsy8, transposase OrfA, putative |
| 1075 | IS3-family transposase, OrfB (orfB) |
| 1076 | ISPsy9, transposase OrfB (orf8) |
| 1077 | HcsB |
| 1078 | HcsA“” |
| 1079 | Bcs4 |
| 1080 | Bcs3 |
| 1081 | unnamed protein product; orf2 |
| 1082 | CDP-ribitol pyrophosphorylase [1.—.—.—] |
| 1083 | CDP-ribitol pyrophosphorylase (putative) [2.7.7.60] |
| 1084 | BexD (AF067140) |
| 1085 | BexC |
| 1086 | Capsule polysaccharide export inner-membrane protein bexB (bexB) |
| 1087 | ATP-binding protein bexA [3.6.3.38] |
| 1088 | thiamine ABC transporter, periplasmic binding protein (tHIB) |
| 1089 | thiamine ABC transporter; permease protein (thiP) |
| 1090 | Thiamine transport ATP-binding protein thiQ [3.6.3.25] |
| 1091 | biotin synthase (bioB) [2.8.1.6] |
| 1092 | transketolase (tkt) [2.2.1.1] |
| 1093 | Protein ahpA precursor (smp-like) |
| 1094 | Phosphoserine phosphatase (PSP) (O-phosphoserinephosphohydrolase) (PSPase) (serB) [3.1.3.3] |
| 1095 | UPF0234 protein |
| 1096 | magnesium and cobalt transport protein CorA (corA) |
| 1097 | Predicted integral membrane protein |
| 1098 | YafJ |
| 1099 | hypothetical protein |
| 1100 | hypothetical protein |
| 1101 | Helix-turn-helix domain protein |
| 1102 | hypothetical protein |
| 1103 | hypothetical protein |
| 1104 | hypothetical protein |
| 1105 | ferredoxin-type protein NapF (napF) |
| 1106 | Cytoplasmic chaperone TorD family |
| 1107 | DMSO reductase anchor subunit (DmsC) (dmsC) [1.8.99.—] |
| 1108 | Anaerobic dimethyl sulfoxide reductase chain B (DMSO reductase iron-sulfur subunit) (dmsB) [1.8.—.—] |
| 1109 | Anaerobic dimethyl sulfoxide reductase chain A precursor(DMSO reductase) (dmsA) [1.8.99.—] |
| 1110 | Protein HI1048 precursor |
| 1111 | MerT (merT) |
| 1112 | MerP (merP) |
| 1113 | ABC transporter, ATP-binding protein NMB0264 (AF035964) |
| 1114 | MtrA (AJ233398) |
| 1115 | carboxymuconolactone decarboxylase family protein |
| 1116 | restriction modification system-R protein |
| 1117 | restriction modification system-R protein [3.1.21.5] |
| 1118 | modification methylase LlaFI (methyltransfera) [2.1.1.72] |
| 1119 | ribonuclease HII (rnhB) [3.1.26.4] |
| 1120 | lipid-A-disaccharide synthase (lpxB) [2.4.1.182] |
| 1121 | acyl-[acyl-carrier-protein]--UDP-N-acetylglucosamine O-acyltransferase (lpxA) [2.3.1.129] |
| 1122 | beta-hydroxyacyl-(acyl-carrier-protein) dehydratase FabZ (fabZ) [4.2.1.—] |
| 1123 | Dca |
| 1124 | uridylate kinase (pyrH) [2.7.4.—] |
| 1125 | NrfD protein homolog (nrfD) [1.—.—.—] |
| 1126 | NrfC protein homolog precursor (nrfC) [1.—.—.—] |
| 1127 | Cytochrome c-type protein nrfB precursor (nrfB) |
| 1128 | Cytochrome c-552 precursor (Ammonia-forming cytochrome cnitrite reductase) (Cytochrome c nitrite reductase) |
| | (nrfA) [1.7.2.2] |
| 1129 | ATP-dependent helicase HrpA (hrpA) |
| 1130 | Uncharacterized small membrane protein |
| 1131 | Protein of unknown function (DUF441) superfamily |
| 1132 | conserved hypothetical protein |
| 1133 | cytochrome d ubiquinol oxidase, subunit II (cydB) [1.10.3.—] |
| 1134 | CydA (cydA) [1.10.3,—] |
| 1135 | CTP synthase (pyrG) [6.3.4.2] |
| 1136 | PnuC transporter (pnuC) |
| 1137 | PnuC transporter |
| 1138 | hypothetical protein |
| 1139 | amino acid ABC transporter, ATP-binding protein NMB0789 (ABC) |
| 1140 | amino-acid ABC transporter permease protein (permease) |
| 1141 | amino acid ABC transporter, periplasmic amino acid-binding protein NMB0787 |
| 1142 | UDP-N-acetylglucosamine 1-carboxyvinyltransferase (murA) [2.5.1.7] |
| 1143 | Protein |
| 1144 | STAS domain, putative |
| 1145 | Protein HI1084 precursor |
| 1146 | VpsC |
| 1147 | unnamed protein product; Highly similar to ABC transporter, permease protein YrbE of Escherichia coli |
| 1148 | ABC transporter ATP binding protein |
| 1149 | superoxide dismutase (Mn) (sodA) [1.15.1.1] |
| 1150 | heme exporter protein CcmA (ccmA) |
| 1151 | heme exporter protein CcmB (ccmB) |
| 1152 | Heme exporter protein C (Cytochrome c-type biogenesis protein ccmC) (ccmC) |
| 1153 | Heme exporter protein D (Cytochrome c-type biogenesis protein ccmD)-related protein |
| 1154 | Cytochrome c-type biogenesis protein ccmE (ccmE) |
| 1155 | cytochrome c-type biogenesis protein CcmF (ccmF) |
| 1156 | Thiol:disulfide interchange protein dsbE (Cytochrome c biogenesisprotein ccmG) (dsbE) |
| 1157 | CcmH (nrfF) |
| 1158 | CcmH (nrfF) |
| 1159 | conserved hypothetical protein |
| 1160 | lipoprotein, putative |
| 1161 | DNA ligase, NAD-dependent (ligA) [6.5.1.2] |
| 1162 | cell division protein ZipA (zipA) |
| 1163 | CysZ protein homolog (cysZ) |
| 1164 | cysteine synthase A (cysK) [2.5.1.47] |
| 1165 | Transporter, MFS superfamily (MFS) |
| 1166 | lipopolysaccharide heptosyltransferase II (rfaF) |
| 1167 | Xylose operon regulatory protein (xylR) |
| 1168 | Na+/H+ antiporter NhaC (nhaC) |
| 1169 | aminotransferase [2.6.1.—] |
| 1170 | Xylose transport system permease protein xylH (xylH) |
| 1171 | D-xylose transport ATP-binding protein xylG (xylG) |
| 1172 | D-xylose-binding periplasmic protein precursor (xylF) |
| 1173 | xylose isomerase (xylA) [5.3.1.5] |
| 1174 | xylulokinase (xylB) [2.7.1.17] |
| 1175 | ADP-L-glycero-D-manno-heptose-6-epimerase (rfaD) [5.1.3.20] |
| 1176 | Thioredoxin-like protein |
| 1177 | deoxyribose-phosphate aldolase (deoC) [4.1.2.4] |
| 1178 | Mg chelatase-related protein |
| 1179 | conserved possible cell division GTP-binding protein |
| 1180 | LapB (lapB) |
| 1181 | Oligopeptide transport ATP-binding protein oppF (oppF) |
| 1182 | Oligopeptide transport ATP-binding protein oppD (oppD) |
| 1183 | Oligopeptide transport system permease protein oppC (oppC) |
| 1184 | Oligopeptide transport system permease protein oppB (oppB) |
| 1185 | Periplasmic oligopeptide-binding protein precursor (oppA) |
| 1186 | transaldolase (talB) [2.2.1.2] |
| 1187 | transaldolase (talB) [2.2.1.2] |
| 1188 | carbon starvation protein |
| 1189 | mraZ protein (mraZ) |
| 1190 | S-adenosyl-methyltransferase MraW (mraW) [2.1.1.—] |
| 1191 | cell division protein FtsL (ftsL) |
| 1192 | Peptidoglycan synthetase ftsl (Peptidoglycanglycosyltransferase 3) (Penicillin-binding protein 3) (PBP-3) (ftsl) |
| | [2.4.1.129] |
| 1193 | UDP-N-acetylmuramoylalanyl-D-glutamate--2,6-diaminopimelate ligase(EC 6.3.2.13) (UDP-N-acetylmuramyl- |
| | tripeptide synthetase) (Meso-diaminopimelate-adding enzyme) (UDP-MurNAc-tripeptide synthetase) (MurE) |
| | [6.3.2.13] |
| 1194 | UDP-N-acetylmuramoyl-tripeptide--D-alanyl-D-alanine ligase(EC 6.3.2.10) (UDP-MurNAc-pentapeptide synthetase) |
| | (D-alanyl-D-alanine-adding enzyme) (murF) [6.3.2.10] |
| 1195 | phospho-N-acetylmuramoyl-pentapeptide-transferase (mraY) [2.7.8.13] |
| 1196 | UDP-N-acetylmuramoylalanine--D-glutamate ligase (murD) [6.3.2.9] |
| 1197 | Cell division protein ftsW (ftsW) |
| 1198 | UDP-N-acetylglucosamine--N-acetylmuramyl-(pentapeptide) pyrophosphoryl-undecaprenol N-acetylglucosamine |
| | transferase (murG) [2.4.1.—] |
| 1199 | UDP-N-acetylmuramate--alanine ligase (murC) [6.3.2.8] |
| 1200 | D-alanine--D-alanine ligase (D-alanylalanine synthetase)(D-Ala-D-Ala ligase) (ddlB) [6.3.2.4] |
| 1201 | Cell division protein ftsQ homolog (ftsQ) |
| 1202 | cell division protein FtsA (ftsA) |
| 1203 | cell division protein FtsZ (ftsZ) |
| 1204 | UDP-3-0-acyl N-acetylglucosamine deacetylase (lpxC) [3.5.1.—] |
| 1205 | P-protein [Includes: Chorismate mutase (CM); Prephenatedehydratase (EC 4.2.1.51) (PDT)] (PDT) [5.4.99.5] |
| 1206 | unnamed protein product; ORF193 peptide fragment (AA 1-192) (1524 is 2nd base in codon) (P-loop) |
| 1207 | PTS IIA-like nitrogen-regulatory protein PtsN (ptsN) |
| 1208 | ABC transporter, ATP-binding protein |
| 1209 | Protein HI1149 precursor |
| 1210 | unnamed protein product; Similar to YrbK precursor protein of Escherichia coli |
| 1211 | Protein of unknown function (DUF615) superfamily |
| 1212 | PmbA protein homolog (pmbA) |
| 1213 | hypoxanthine phosphoribosyltransferase (hpt) [2.4.2.8] |
| 1214 | conserved hypothetical protein |
| 1215 | kinase-like protein (gltP) |
| 1216 | Anaerobic ribonucleoside-triphosphate reductase activating protein(EC 1.97.1.4) (Class III anaerobic ribonucleotide |
| | reductase smallcomponent) (nrdG) [1.97.1.4] |
| 1217 | Transport ATP-binding protein cydC (cydC) |
| 1218 | Transport ATP-binding protein cydD (cydD) |
| 1219 | thioredoxin-disulfide reductase (trxB) [1.8.1.9] |
| 1220 | Protein |
| 1221 | ferrochelatase (hemH) [4.99.1.1] |
| 1222 | uncharacterized protein conserved in bacteria |
| 1223 | Protein |
| 1224 | Outer membrane protein P5 precursor (OMP P5) (ompA) |
| 1225 | glutaredoxin-related protein |
| 1226 | histidinol-phosphate aminotransferase (hisC) [2.6.1.9] |
| 1227 | phosphoserine aminotransferase (serC) [2.6.1.52] |
| 1228 | UPF0265 protein |
| 1229 | chorismate binding enzyme [4.1.3.—] |
| 1230 | p-aminobenzoate synthase component I (pabB) [4.1.3.—] |
| 1231 | TrpG (trpG) [4.1.3.27] |
| 1232 | S-adenosylmethionine synthetase (metK) [2.5.1.6] |
| 1233 | Protein sprT (sprT) |
| 1234 | OPA protein |
| 1235 | conserved hypothetical protein |
| 1236 | Arginine transport system permease protein artM (artM) |
| 1237 | Arginine transport system permease protein artQ (artQ) |
| 1238 | Arginine-binding periplasmic protein precursor (artI) |
| 1239 | Arginine transport ATP-binding protein artP (artP) |
| 1240 | phosphoheptose isomerase (gmhA) |
| 1241 | hypothetical protein |
| 1242 | DNA ligase (Polydeoxyribonucleotide synthase [ATP]) [6.5.1.1] |
| 1243 | Dipeptide transport ATP-binding protein dppF (dppF) |
| 1244 | Dipeptide transport ATP-binding protein dppD (dppD) |
| 1245 | Dipeptide transport system permease protein dppC (dppC) |
| 1246 | Dipeptide transport system permease protein dppB (dppB) |
| 1247 | hypothetical protein |
| 1248 | hypothetical protein |
| 1249 | DNA helicase II (uvrD) [3.6.1.—] |
| 1250 | Vng6305c |
| 1251 | 6-pyruvoyl tetrahydropterin synthase, putative [4.2.3.12] |
| 1252 | exsB protein |
| 1253 | lipoprotein, putative |
| 1254 | Eag0009 |
| 1255 | Eag0010 |
| 1256 | Eag0011 |
| 1257 | branched-chain amino acid aminotransferase (ilvE) [2.6.1.42] |
| 1258 | Glycine cleavage system transcriptional activator homolog (gcvA) |
| 1259 | SAM-dependent methyltransferase-like protein |
| 1260 | Succinyl-CoA synthetase beta chain (SCS-beta) (sucC) [6.2.1.5] |
| 1261 | Succinyl-CoA synthetase alpha chain (SCS-alpha) (sucD) [6.2.1.5] |
| 1262 | Sua5/YciO/YrdC/YwlC family protein |
| 1263 | Ribosomal large subunit pseudouridine synthase B(Pseudouridylate synthase) (Uracil hydrolase) [4.2.1.70] |
| 1264 | HTH-type transcriptional regulator cysB (Cys regulon transcriptionalactivator) (cysB) |
| 1265 | 2.1.1.72 [2.1.1.72] |
| 1266 | Hypothetical UPF0115 protein |
| 1267 | phosphate acetyltransferase (pta) [2.3.1.8] |
| 1268 | acetate kinase (ackA) [2.7.2.1] |
| 1269 | hypothetical protein |
| 1270 | b2295 |
| 1271 | CvpA family protein (cvpA) |
| 1272 | amidophosphoribosyltransferase (purF) [2.4.2.14] |
| 1273 | conserved hypothetical protein TIGR01777 |
| 1274 | arginine repressor (argR) |
| 1275 | malate dehydrogenase, NAD-dependent (mdh) [1.1.1.37] |
| 1276 | Lysyl-tRNA synthetase (Lysine--tRNA ligase) (LysRS) (lysU) [6.1.1.6] |
| 1277 | Lysyl-tRNA synthetase (Lysine--tRNA ligase) (LysRS) (lysU) [6.1.1.6] |
| 1278 | Peptide chain release factor 2 (RF-2) (RF) |
| 1279 | Thiol:disulfide interchange protein dsbC precursor (dsbC) [5.3.4.1] |
| 1280 | single-stranded-DNA-specific exonuclease RecJ (recJ) [3.1.—.—] |
| 1281 | DSBA-like thioredoxin domain family |
| 1282 | MTA/SAH nucleosidase |
| 1283 | TonB-dependent receptor NMB1497 (Y08983) |
| 1284 | LctP (lctP) |
| 1285 | cytidylate kinase (cmk) [2.7.4.14] |
| 1286 | ribosomal protein S1 (rpsA) |
| 1287 | integration host factor, beta subunit (ihfB) |
| 1288 | predicted membrane protein |
| 1289 | predicted N-acetylglucosaminyl transferase |
| 1290 | orotidine 5′-phosphate decarboxylase (pyrF) [4.1.1.23] |
| 1291 | translation initation factor SUI1, putative |
| 1292 | DnaA family protein (dnaA) |
| 1293 | uracil permease (uraA) |
| 1294 | hypothetical protein |
| 1295 | uracil phosphoribosyltransferase (upp) [2.4.2.9] |
| 1296 | DNA polymerase III subunit gamma/tau (dnaX) [2.7.7.7] |
| 1297 | adenine phosphoribosyltransferase (apt) [2.4.2.7] |
| 1298 | dihydrolipoamide dehydrogenase (lpdA) [1.8.1.4] |
| 1299 | pyruvate dehydrogenase complex dihydrolipoamide acetyltransferase (aceF) [2.3.1.12] |
| 1300 | Pyruvate dehydrogenase E1 component (aceE) [1.2.4.1] |
| 1301 | hypothetical protein |
| 1302 | methylglyoxal synthase (mgsA) [4.2.3.3] |
| 1303 | conserved hypothetical protein |
| 1304 | dnaK-type molecular chaperone (dnaK) |
| 1305 | heat shock protein dnaJ (dnaJ) |
| 1306 | gamma-glutamyl phosphate reductase (proA) [1.2.1.41] |
| 1307 | membrane protein |
| 1308 | membrane protein, putative |
| 1309 | Bicyclomycin resistance protein homolog (bcr) |
| 1310 | Ribosomal small subunit pseudouridine synthase A (16Spseudouridylate 516 synthase) (16S pseudouridine 516 |
| | synthase) (Uracilhydrolyase) (rsuA) [4.2.1.70] |
| 1311 | CpsH protein |
| 1312 | hypothetical protein |
| 1313 | NADP-dependent malic enzyme (NADP-ME) (oxaloacetate-de) [1.1.1.40] |
| 1314 | sulfatase |
| 1315 | UvrABC system protein B (UvrB protein) (Excinuclease ABC subunit B) (uvrB) |
| 1316 | High-affinity nickel-transport protein family |
| 1317 | Protein of unknown function (DUF1007) superfamily |
| 1318 | proteic killer supression protein (putative) |
| 1319 | unnamed protein product; Some similarities with virulence associated protein A (vapA) |
| 1320 | ABC transporter ATP-binding protein (ABC) |
| 1321 | Invasion gene expression up-regulator, SirB superfamily |
| 1322 | similar to [SwissProt Accession Number P44140] (GNAT) |
| 1323 | conserved hypothetical protein |
| 1324 | transcription-repair coupling factor (mfd) |
| 1325 | HtrA [3.4.21.—] |
| 1326 | acetyl-CoA carboxylase, carboxyl transferase, beta subunit (accD) [6.4.1.2] |
| 1327 | Folypolyglutamate synthase (Folylpoly-gamma-glutamatesynthetase) (FPGS) (folC) [6.3.2.17] |
| 1328 | hypothetical protein |
| 1329 | SanA protein homolog (sanA) |
| 1330 | homoserine O-acetyltransferase (metX) [2.3.1.31] |
| 1331 | DNA gyrase, A subunit (gyrA) [5.99.1.3] |
| 1332 | ycaO protein |
| 1333 | conserved hypothetical protein |
| 1334 | possible iron ABC transporter periplasmic binding protein (III) |
| 1335 | HemU (III) |
| 1336 | iron (III) |
| 1337 | conserved hypothetical protein |
| 1338 | GloB [3.1.2.6] |
| 1339 | tellurite resistance protein TehB (tehB) |
| 1340 | Methionyl-tRNA synthetase (Methionine--tRNA ligase)(MetRS) (metG) [6.1.1.10] |
| 1341 | Mrp (mrp) |
| 1342 | NAD(P)H nitroreductase [1.—.—.—] |
| 1343 | cytidine 5″″monophosphate N-acetylneuraminic acid synthetase (neuA) [2.7.7.43] |
| 1344 | YhbC-like protein |
| 1345 | Transcription elongation protein nusA (nusA) |
| 1346 | Translation initiation factor IF-2 (infB) |
| 1347 | HSDR (hsdR) [3.1.21.3] |
| 1348 | conserved hypothetical protein |
| 1349 | Prolipoprotein, putative |
| 1350 | hypothetical protein |
| 1351 | conserved hypothetical protein |
| 1352 | HsdA (hsdS) |
| 1353 | ALXA and HSDM (hsdM) [2.1.1.72] |
| 1354 | ribosome-binding factor A (rbfA) |
| 1355 | tRNA pseudouridine synthase B (tRNA pseudouridine 55synthase) (Psi55 synthase) (Pseudouridylate synthase) |
| | (Uracilhydrolyase) (truB) [4.2.1.70] |
| 1356 | T-protein [Includes: Chorismate mutase (CM); Prephenatedehydrogenase (EC 1.3.1.12) (PDH)] (PDH) [5.4.99.5] |
| 1357 | possible GTP cyclohydrolase I |
| 1358 | Zn-ribbon-containing protein |
| 1359 | possible GTP cyclohydrolase I |
| 1360 | Zn-ribbon-containing protein |
| 1361 | uncharacterized protein conserved in bacteria (orf5) |
| 1362 | Zn-ribbon-containing protein |
| 1363 | uncharacterized protein conserved in bacteria (orf5) |
| 1364 | Cysteine sulfinate desulfinase (CSD) (CSD) [2.8.1.7] |
| 1365 | micrococcal nuclease-like protein (SNase) [3.1.31.1] |
| 1366 | Holin-like protein cidA 2 |
| 1367 | membrane protein, putative |
| 1368 | Deoxyguanosinetriphosphate triphosphohydrolase-like protein (DGTPASE) [3.1.5.1] |
| 1369 | hypothetical protein |
| 1370 | ABC transporter ATP-binding protein uup-1 |
| 1371 | Protein yadF [4.2.1.1] |
| 1372 | asparaginyl-tRNA synthetase (asnS) [6.1.1.22] |
| 1373 | 6,7-dimethyl-8-ribityllumazine synthase (ribH) [2.5.1.9] |
| 1374 | transcription antitermination factor NusB (nusB) |
| 1375 | thiamine-monophosphate kinase (thiL) [2.7.4.16] |
| 1376 | Phosphatidylglycerophosphatase A (pgpA) [3.1.3.27] |
| 1377 | threonine efflux protein |
| 1378 | dihydrodipicolinate reductase (dapB) [1.3.1.26] |
| 1379 | unnamed protein product; Similar to ferredoxin-like protein YfaE of Escherichia coli (petF1) [1.17.1.—] |
| 1380 | conserved hypothetical protein |
| 1381 | phenylalanyl-tRNA synthetase, alpha subunit (pheS) [6.1.1.20] |
| 1382 | phenylalanyl-tRNA synthetase, beta subunit (pheT) [6.1.1.20] |
| 1383 | integration host factor, alpha subunit (ihfA) |
| 1384 | lipoprotein (nlpC) |
| 1385 | conserved hypothetical protein |
| 1386 | Putative 5′(3′)-deoxyribonucleotidase (dNT) [3.1.3.—] |
| 1387 | NAD-dependent deacetylase (Regulatory protein SIR2homolog) (DMB) [3.5.1.—] |
| 1388 | conserved hypothetical protein |
| 1389 | XpsR, putative |
| 1390 | death-on-curing family protein |
| 1391 | DNA translocase ftsK |
| 1392 | transcriptional regulator, Sir2 family (DMB) [3.5.1.—] |
| 1393 | probable phosphoprotein phosphatase homolog Imo1821, putative |
| 1394 | Protein of unknown function DUF262 family |
| 1395 | PUTATIVE ATPASE PROTEIN, putative |
| 1396 | arylsulfatase A [3.1.6.—] |
| 1397 | HI1317 (fragment) |
| 1398 | translation initiation factor IF-3 (infC) |
| 1399 | ribosomal protein L35 (rpL35) |
| 1400 | ribosomal protein L20 (rplT) |
| 1401 | exodeoxyribonuclease V, beta subunit (recB) [3.1.11.5] |
| 1402 | exodeoxyribonuclease V, alpha subunit (recD) [3.1.11.5] |
| 1403 | Hypothetical UPF0268 protein |
| 1404 | Ion protease (Ion) [3.4.21.—] |
| 1405 | beta-hydroxyacyl-(acyl-carrier-protein) dehydratase FabA (fabA) [4.2.1.—] |
| 1406 | conserved hypothetical protein |
| 1407 | lipoprotein, putative |
| 1408 | ribosomal protein S15 (rpsO) |
| 1409 | D-alanyl-D-alanine carboxypeptidase/D-alanyl-D-alanine-endopeptidase (dacB) [3.4.16.4] |
| 1410 | Transcription elongation factor greA (Transcript cleavage factorgreA) (greA) |
| 1411 | conserved hypothetical protein TIGR00253 |
| 1412 | ribosomal RNA large subunit methyltransferase J (rrmJ) [2.1.1.—] |
| 1413 | Cell division protein ftsH homolog 1 (ftsH) [3.4.24.—] |
| 1414 | conserved hypothetical protein |
| 1415 | uncharacterized protein conserved in bacteria (orf5) |
| 1416 | selenocysteine lyase (CSD) [2.8.1.7] |
| 1417 | ABC transporter ATP-binding protein uup-1 |
| 1418 | ABC transporter ATP-binding protein uup-1 |
| 1419 | Cell division protein ftsH homolog 1 (ftsH) [3.4.24.—] |
| 1420 | HmcB (AP001508) |
| 1421 | HmcC [3.4.22.—] |
| 1422 | HmcD |
| 1423 | spermidine/putrescine-binding protein 1 precursor (potD) |
| 1424 | spermidine/putrescine transport system permease potC (potC) |
| 1425 | Spermidine/putrescine transport system permease protein potB (potB) |
| 1426 | Spermidine/putrescine transport ATP-binding protein potA (potA) |
| 1427 | peptidase T (pepT) [3.4.11.14] |
| 1428 | Protein (napA) |
| 1429 | cytidine deaminase (cdd) [3.5.4.5] |
| 1430 | methyltransferase, putative |
| 1431 | sodium/proline symporter (putP) |
| 1432 | Ribonuclease G (RNase G) (Cytoplasmic axial filamentprotein) (cafA) [3.1.4.—] |
| 1433 | glutaminyl-tRNA synthetase (glnS) [6.1.1.18] |
| 1434 | YcgN |
| 1435 | 4-alpha-glucanotransferase (malQ) [2.4.1.25] |
| 1436 | 1,4-alpha-glucan branching enzyme (glgB) [2.4.1.18] |
| 1437 | glycogen debranching enzyme GlgX (glgX) [3.2.1.—] |
| 1438 | glucose-1-phosphate adenylyltransferase (glgC) [2.7.7.27] |
| 1439 | Glycogen synthase (Starch [bacterial glycogen]synthase) (glgA) [2.4.1.21] |
| 1440 | hypothetical protein |
| 1441 | hypothetical protein |
| 1442 | Glycogen phosphorylase (glgP) [2.4.1.1] |
| 1443 | NAD(P) transhydrogenase, alpha subunit (pntA) [1.6.1.1] |
| 1444 | NAD(P) transhydrogenase subunit beta (Pyridinenucleotide transhydrogenase subunit beta) (Nicotinamide |
| | nucleotidetranshydrogenase subunit beta) (pntB) [1.6.1.2] |
| 1445 | Bacterial regulatory protein, LysR family (PA4174) |
| 1446 | DNA topoisomerase (topA) [5.99.1.2] |
| 1447 | acyl carrier protein phosphodiesterase (acpD) [3.1.4.14] |
| 1448 | threonyl-tRNA synthetase (thrS) [6.1.1.3] |
| 1449 | PqqL [3.4.99.—] |
| 1450 | conserved hypothetical protein |
| 1451 | MOLYBDENUM-PTERIN-BINDING PROTEIN (mopl) |
| 1452 | dissimilatory sulfite reductase, gamma subunit (dsvC) [1.8.—.—] |
| 1453 | YdaO protein |
| 1454 | killing factor kicB (kicB) |
| 1455 | Chromosome partition protein mukE (kicA) |
| 1456 | MukB (mukB) |
| 1457 | conserved hypothetical protein |
| 1458 | integral membrane protein |
| 1459 | Exodeoxyribonuclease I (Exonuclease I) (DNAdeoxyribophosphodiesterase) (dRPase) (sbcB) [3.1.11.1] |
| 1460 | Phosphate regulon sensor protein phoR (phoR) [2.7.3.—] |
| 1461 | Phosphate regulon transcriptional regulatory protein phoB (phoB) |
| 1462 | phosphate ABC transporter, ATP-binding protein (pstB) [3.6.3.27] |
| 1463 | phosphate ABC transporter, permease protein PtsA (pstA) |
| 1464 | phosphate ABC transporter, permease protein PstC (pstC) |
| 1465 | phosphate ABC transporter, phosphate-binding protein (pstS) |
| 1466 | nonheme ferritin homolog (rsgA) |
| 1467 | Ferritin like protein 2 (rsgA) |
| 1468 | possible glycosyltransferase |
| 1469 | anthranilate synthase component I (trpE) [4.1.3.27] |
| 1470 | Anthranilate synthase component II (Glutamine amido-transferase) (trpG) [4.1.3.27] |
| 1471 | Uncharacterized protein, 4-oxalocrotonate tautomerase homolog |
| 1472 | anthranilate phosphoribosyltransferase (trpD) [2.4.2.18] |
| 1473 | Tryptophan biosynthesis protein trpCF [Includes: Indole-3-glycerolphosphate synthase (IGPS); N-(5′-phospho- |
| | ribosyl)anthranilate isomerase (EC 5.3.1.24) (PRAI)] (trpC) [4.1.1.48] |
| 1474 | hydrogenase assembly chaperone HypC/HupF (hypC) |
| 1475 | valyl-tRNA synthetase (valS) [6.1.1.9] |
| 1476 | Modification methylase HindIII (Adenine-specificmethyltransferase HindIII) (M. HindIII) (hindIIIM) [2.1.1.72] |
| 1477 | Type II restriction enzyme HindIII (EndonucleaseHindIII) (R. HindIII) (hindIIIR) [3.1.21.4] |
| 1478 | UPF0267 protein |
| 1479 | conserved hypothetical protein |
| 1480 | DNA polymerase III, chi subunit (holC) [2.7.7.7] |
| 1481 | fumarate hydratase, class II (fumC) [4.2.1.2] |
| 1482 | conserved hypothetical protein |
| 1483 | Protein trpH |
| 1484 | dihydroorotate dehydrogenase (pyrD) [1.3.3.1] |
| 1485 | conserved hypothetical protein |
| 1486 | Eag0005 |
| 1487 | Eag0003 |
| 1488 | conserved hypothetical protein |
| 1489 | conserved hypothetical protein |
| 1490 | conserved hypothetical protein |
| 1491 | conserved hypothetical protein |
| 1492 | conserved hypothetical protein |
| 1493 | putative baseplate protein |
| 1494 | conserved hypothetical protein |
| 1495 | conserved hypothetical protein |
| 1496 | hypothetical protein |
| 1497 | conserved hypothetical protein |
| 1498 | conserved hypothetical protein |
| 1499 | putative tail length tape measure protein |
| 1500 | conserved hypothetical protein |
| 1501 | conserved hypothetical protein |
| 1502 | conserved hypothetical protein |
| 1503 | conserved hypothetical protein |
| 1504 | conserved hypothetical protein |
| 1505 | conserved hypothetical protein |
| 1506 | conserved hypothetical protein |
| 1507 | conserved hypothetical protein |
| 1508 | conserved hypothetical protein |
| 1509 | conserved hypothetical protein |
| 1510 | conserved hypothetical protein |
| 1511 | Protein traN |
| 1512 | phage-related protein, HI1409 family |
| 1513 | phage terminase, large subunit, PBSX family |
| 1514 | Terminase small subunit superfamily |
| 1515 | Protein of unknown function superfamily |
| 1516 | DNA-binding protein |
| 1517 | conserved hypothetical protein |
| 1518 | lytic enzyme |
| 1519 | phage holin, lambda family |
| 1520 | conserved hypothetical protein |
| 1521 | conserved hypothetical protein |
| 1522 | integrase |
| 1523 | conserved hypothetical protein |
| 1524 | Anaerobic regulatory protein (fnr) |
| 1525 | Universal stress protein E homolog |
| 1526 | Protein HI1427 precursor |
| 1527 | phosphoribosylglycinamide formyltransferase (purN) [2.1.2.2] |
| 1528 | phosphoribosylformylglycinamidine cyclo-ligase (purM) [6.3.3.1] |
| 1529 | YdfG (AB032242) [1.—.—.—] |
| 1530 | tryptophan synthase, beta subunit (trpB) [4.2.1.20] |
| 1531 | tryptophan synthase, alpha subunit (trpA) [4.2.1.20] |
| 1532 | USG-1 protein homolog (usg1) [1.2.1.—] |
| 1533 | ybaK/ebsC protein (ybaK) |
| 1534 | Cold shock-like protein cspD (cspD) |
| 1535 | Uncharacterised protein family (UPF0181) superfamily |
| 1536 | tRNA pseudouridine synthase C (Pseudouridylate synthase)(Uracil hydrolyase) (orfx) [4.2.1.70] |
| 1537 | tRNA pseudouridine synthase C (Pseudouridylate synthase)(Uracil hydrolyase) [4.2.1.70] |
| 1538 | Thiamine biosynthesis protein thil (thil) |
| 1539 | exodeoxyribonuclease VII, small subunit (xseB) [3.1.11.6] |
| 1540 | Geranyltranstransferase (Farnesyl-diphosphate synthase)(FPP synthase) (ispA) [2.5.1.10] |
| 1541 | 1-deoxy-D-xylulose-5-phosphate synthase (dxs) [2.2.1.7] |
| 1542 | transcriptional regulator |
| 1543 | Stringent starvation protein B homolog (sspB) |
| 1544 | Stringent starvation protein A homolog (sspA) |
| 1545 | ribosomal protein S9 (rpsl) |
| 1546 | ribosomal protein L13 (rpIM) |
| 1547 | 5,10-methylenetetrahydrofolate reductase (metF) [1.7.99.5] |
| 1548 | dethiobiotin synthetase (bioD) [6.3.3.3] |
| 1549 | Uncharacterized protein conserved in bacteria |
| 1550 | GTP cyclohydrolase I (folE) [3.5.4.16] |
| 1551 | Molybdopterin biosynthesis protein moeA (moeA) |
| 1552 | Molybdopterin biosynthesis protein moeB (moeB) |
| 1553 | Hypothetical UPF0263 protein |
| 1554 | Protein HI1453 precursor (thioredoxin) [1.8.4.6] |
| 1555 | Cytochrome c-type biogenesis protein ccdA (ccdA) [4.4.1.17] |
| 1556 | Peptide methionine sulfoxide reductase msrA/msrB[Includes: Peptide methionine sulfoxide reductase msrA |
| | (Protein-methionine-S-oxide reductase) (Peptide Met(O) reductase); Peptidemethionine sulfoxide reductase msrB] |
| | (msrA) [1.8.4.6] |
| 1557 | lipoprotein, putative |
| 1558 | Protein HI1457 precursor |
| 1559 | Eag0009 |
| 1560 | unnamed protein product; Similar to transcription initiation factor sigma homolog (sigma-W) |
| 1561 | Invasin precursor (Outer membrane adhesin) |
| 1562 | hypothetical protein |
| 1563 | hypothetical protein |
| 1564 | RND efflux system, outer membrane lipoprotein, NodT family subfamily |
| 1565 | H. influenzae predicted coding region HI1462.1 (LEA) |
| 1566 | ferrichrome-iron outermembrane receptor protein |
| 1567 | Cell division protein ftsH homolog 1 (ftsH) [3.4.24.—] |
| 1568 | Cell division protein ftsH homolog 1 (ftsH) [3.4.24.—] |
| 1569 | dihydropteroate synthase (folP) [2.5.1.15] |
| 1570 | phosphoglucosamine mutase (glmM) [5.4.2.—] |
| 1571 | phosphohistidine phosphatase SixA (sixA) [3.1.3.—] |
| 1572 | Hypothetical tonB-dependent receptor HI1466.1 |
| 1573 | Hypothetical ABC transporter ATP-binding protein |
| 1574 | ABC transporter, ATP-binding protein (ALD) |
| 1575 | ribosomal protein S15 (rpsO) |
| 1576 | molybdenum-binding periplasmic protein |
| 1577 | iron (III) |
| 1578 | ABC-type iron transport system, permease component CAC1990 (III) |
| 1579 | Protein HI1472 precursor (III) |
| 1580 | modD protein (modD) |
| 1581 | FbpC (III) [3.6.3.25] |
| 1582 | NifC-like ABC-type porter |
| 1583 | molybdenum ABC transporter, periplasmic molybdate-binding protein (modA) |
| 1584 | ADP-heptose synthase (rfaE) [2.7.—.—] |
| 1585 | hypothetical protein |
| 1586 | lipid A biosynthesis lauroyl acyltransferase (htrB) [2.3.1.—] |
| 1587 | DNA topoisomerase IV, B subunit (parE) [5.99.1.—] |
| 1588 | DNA topoisomerase IV, A subunit (parC) [5.99.1.—] |
| 1589 | sodium/glutamate symporter (gltS) |
| 1590 | RimK (rimK) [6.3.2.—] |
| 1591 | Glutaredoxin, GrxA family (grxA) |
| 1592 | 3-oxoacyl-[acyl-carrier-protein] synthase I (Beta-ketoacyl-ACP synthase I) (KAS I) (fabB) [2.3.1.41] |
| 1593 | Protein of unknown function (DUF752) family |
| 1594 | LicA protein (licA) |
| 1595 | lic-1 protein B (licB) |
| 1596 | Protein licC (licC) |
| 1597 | lic-1 protein D (licD) |
| 1598 | lic-1 protein D (licD) |
| 1599 | signal peptide peptidase SppA, 67K type (sppA) [3.4.—.—] |
| 1600 | Protein ydjA [1.—.—.—] |
| 1601 | conserved hypothetical protein |
| 1602 | NAD(P)H oxidoreductase BH2748 [1.6.99.—] |
| 1603 | Na/dicarboxylate symporter |
| 1604 | ImpA (R391) [3.4.21.—] |
| 1605 | phospho-2-dehydro-3-deoxyheptonate aldolase [2.5.1.54] |
| 1606 | lipoprotein releasing system, transmembrane protein LolE (lolE) |
| 1607 | lipoproteln releasing system, ATP-binding protein (lolD) |
| 1608 | dethiobiotin synthase (bioD) [6.3.3.3] |
| 1609 | biotin biosynthesis protein BioC (bioC) |
| 1610 | Protein of unknown function (DUF452) superfamily |
| 1611 | 8-amino-7-oxononanoate synthase (bioF) [2.3.1.47] |
| 1612 | adenosylmethionine-8-amino-7-oxononanoate aminotransferase (bioA) [2.6.1.62] |
| 1613 | Lipoprotein releasing system transmembrane protein lolC |
| 1614 | lactate dehydrogenase [1.1.1.29] |
| 1615 | 3-deoxy-8-phosphooctulonate synthase (kdsA) [2.5.1.55] |
| 1616 | Protein sirB1 |
| 1617 | HemK protein homobog (M. HindHemKP) (hemK) [2.1.1.—] |
| 1618 | RDD family superfamily |
| 1619 | peptide chain release factor 1 (prfA) |
| 1620 | Protein-related protein |
| 1621 | uncharacterized protein conserved in bacteria |
| 1622 | conserved hypothetical protein |
| 1623 | conserved hypothetical protein |
| 1624 | Probable tail fiber protein (ORF31) |
| 1625 | Eag0003 |
| 1626 | conserved hypothetical protein |
| 1627 | conserved hypothetical protein |
| 1628 | Mu-like prophage FluMu protein gp46 |
| 1629 | baseplate assembly protein V, probable NMB1111 |
| 1630 | Bacteriophage Mu P protein |
| 1631 | phage virion protein, probable NMB1109, putative |
| 1632 | hypothetical protein |
| 1633 | conserved hypothetical protein |
| 1634 | probable transposase protein |
| 1635 | replication protein, putative |
| 1636 | replication protein |
| 1637 | conserved hypothetical protein |
| 1638 | regulatory protein |
| 1639 | similar to Cl repressor of bacteriophage lambda |
| 1640 | hypothetical protein |
| 1641 | hypothetical protein |
| 1642 | hypothetical protein |
| 1643 | hypothetical protein |
| 1644 | Serine/threonine-protein kinase PK-1 (stoPK-1) [2.7.1.37] |
| 1645 | Protein serine/threonine phosphatases [3.1.3.—] |
| 1646 | KilA-N domain family |
| 1647 | prophage CP4-57 integrase |
| 1648 | hypothetical protein |
| 1649 | pyruvate kinase (pyk) [2.7.1.40] |
| 1650 | hypothetical protein |
| 1651 | replicative DNA helicase (dnaB) [3.6.1.—] |
| 1652 | alanine racemase (alr) [5.1.1.1] |
| 1653 | glucose-6-phosphate isomerase (pgi) [5.3.1.9] |
| 1654 | 15 kd peptidoglycan-associated outer membrane lipoprotein precursor (lpp) |
| 1655 | Hypothetical lipoprotein PM0553 precursor |
| 1656 | Protein yecM |
| 1657 | arginyl-tRNA synthetase (argS) [6.1.1.19] |
| 1658 | acetolactate synthase, small subunit (ilvN) [2.2.1.6] |
| 1659 | acetolactate synthase, large subunit, biosynthetic type (ilvB) [2.2.1.6] |
| 1660 | Na+/H+ antiporter |
| 1661 | DNA-binding protein H-NS homolog (hns) |
| 1662 | formyltetrahydrofolate deformylase (purU) [3.5.1.10] |
| 1663 | 3-phosphoshikimate 1-carboxyvinyltransferase (aroA) [2.5.1.19] |
| 1664 | ATPase-like protein (putative) |
| 1665 | outer membrane lipoprotein carrier protein LolA (lolA) |
| 1666 | DNA translocase ftsK |
| 1667 | Leucine-responsive regulatory protein (lrp) |
| 1668 | DNA repair protein RadA (radA) |
| 1669 | Rd1598 |
| 1670 | conserved hypothetical protein |
| 1671 | Protein of unknown function (DUF692) superfamily |
| 1672 | EF hand domain protein |
| 1673 | hypothetical protein |
| 1674 | Uncharacterized conserved membrane protein (COG2259) |
| 1675 | conserved hypothetical protein TIGR00153 |
| 1676 | pho4 family protein VC2442 |
| 1677 | conserved hypothetical protein |
| 1678 | tRNA nucleotidyltransferase (tRNA adenylyltransferase)(tRNA CCA-pyrophosphorylase) (CCA-adding enzyme) |
| | (cca) [2.7.7.25] |
| 1679 | outer membrane lipoprotein LolB (lolB) |
| 1680 | 4-diphosphocytidyl-2C-methyl-D-erythritol kinase (ispE) [2.7.1.148] |
| 1681 | Ribose-phosphate pyrophosphokinase (RPPK) (Phosphoribosylpyrophosphate synthetase) (P-Rib-PP synthetase) |
| | (PRPP synthetase) (prsA) [2.7.6.1] |
| 1682 | tyrosyl-tRNA synthetase (tyrS) [6.1.1.1] |
| 1683 | sugar fermentation stimulation protein (sfsA) |
| 1684 | Multidrug resistance protein NorM |
| 1685 | riboflavin synthase, alpha subunit (ribE) [2.5.1.9] |
| 1686 | Aminopeptidase N (Alpha-aminoacylpeptide hydrolase) (pepN) [3.4.11.2] |
| 1687 | Major fimbrial subunit precursor (Major pilin) |
| 1688 | phosphoribosylaminoimidazole carboxylase, catalytic subunit (purE) [4.1.1.21] |
| 1689 | phosphoribosylaminoimidazole carboxylase, ATPase subunit (purK) [4.1.1.21] |
| 1690 | Aspartate aminotransferase (Transaminase A) (ASPAT) (aspC) [2.6.1.1] |
| 1691 | cobalt transport ATP-binding protein CbiO (cbiO) |
| 1692 | cobalt membrane transport protein CbiQ |
| 1693 | CbiM |
| 1694 | conserved hypothetical protein |
| 1695 | Protein HI1624 precursor |
| 1696 | HTH-type transcriptional regulator zntR homobog (merR2) |
| 1697 | 29 kDa protein |
| 1698 | membrane protein, putative |
| 1699 | translation initiation inHIBitor |
| 1700 | Protein of unknown function (DUF1043) superfamily |
| 1701 | possible integral membrane protein of DedA family (dedA) |
| 1702 | Ribosomal L25p family |
| 1703 | lysine-sensitive aspartokinase III [2.7.2.4] |
| 1704 | adenylosuccinate synthetase (purA) [6.3.4.4] |
| 1705 | 2,3,4,5-tetrahydropyridine-2,6-dicarboxylate N-succinyltransferase (dapD) [2.3.1.117] |
| 1706 | HTH-type transcriptional repressor purR (Purine nucleotide synthesisrepressor) (purR) |
| 1707 | phosphoenolpyruvate carboxylase (ppc) [4.1.1.31] |
| 1708 | YcjX |
| 1709 | Peptide transport periplasmic protein sapA precursor (sapA) |
| 1710 | Peptide transport system permease protein sapB (sapB) |
| 1711 | Peptide transport system permease protein sapC (sapC) |
| 1712 | Peptide transport system ATP-binding protein sapD (sapD) |
| 1713 | Peptide transport system ATP-binding protein sapF (sapF) |
| 1714 | membrane protein, putative |
| 1715 | tRNA pseudouridine synthase A (truA) [4.2.1.70] |
| 1716 | fructose-1,6-bisphosphatase (fbp) [3.1.3.11] |
| 1717 | pyridoxine biosynthesis protein |
| 1718 | 2-deoxy-scyllo-inosose synthase 20 kDa subunit |
| 1719 | D-lactate dehydrogenase (dld) [1.1.1.28] |
| 1720 | Type I site-specific deoxyribonuclease HsdR [3.1.21.3] |
| 1721 | aerobic respiration control sensor protein [2.7.3.—] |
| 1722 | Lipoprotein spr precursor (spr) |
| 1723 | TldD (CSRA) |
| 1724 | conserved hypothetical protein TIGR00096 |
| 1725 | LppC |
| 1726 | conserved hypothetical protein TIGR00252 |
| 1727 | conserved possible phosphoheptose isomerase (gmhA) [5.—.—.—] |
| 1728 | 21 kDa hemolysin precursor |
| 1729 | ribonucleoside-diphosphate reductase alpha chain (nrdA) [1.17.4.1] |
| 1730 | ribonucleoside-diphosphate reductase, beta subunit [1.17.4.1] |
| 1731 | 2-oxoglutarate dehydrogenase, E2 component, dihydrolipoamide succinyltransferase (sucB) [2.3.1.61] |
| 1732 | 2-oxoglutarate dehydrogenase, E1 component (sucA) [1.2.4.2] |
| 1733 | metallo-beta-lactamase superfamily protein [3.—.—.—] |
| 1734 | 3.1.21.—[3.1.21.—] |
| 1735 | Bacterial protein of unknown function (DUF882) superfamily |
| 1736 | cell wall degradation protein (AE005282) |
| 1737 | Tail-specific protease precursor (Protease Re) (C-terminal processing peptidase) (prc) [3.4.21.102] |
| 1738 | ProQ |
| 1739 | paraquat-inducible protein A |
| 1740 | Protein (fragment) |
| 1741 | Molybdopterin converting factor subunit 2 (MPT synthase subunit 2)(Molybdopterin synthase subunit 2) |
| | (Molybdenum cofactor biosynthesisprotein E) (Molybdopterin converting factor large subunit) (moaE) |
| 1742 | molybdopterin converting factor, subunit 1 (moaD) |
| 1743 | molybdenum cofactor biosynthesis protein C (moaC) |
| 1744 | Molybdenum cofactor biosynthesis protein A (moaA) |
| 1745 | NorA |
| 1746 | KpsF (kpsF) [5.—.—.—] |
| 1747 | 3-deoxy-D-manno-octulosonate 8-phosphate phosphatase(KDO 8-P phosphatase) [3.1.3.45] |
| 1748 | hypothetical membrane protein, TIGR01666 (yccS) |
| 1749 | Protein HI1681 precursor |
| 1750 | Possible protease sohB (sohB) [3.4.21.—] |
| 1751 | Electron transport complex protein rnfA [1.6.5.—] |
| 1752 | Electron transport complex protein rnfB |
| 1753 | Electron transport complex protein rnfC |
| 1754 | Electron transport complex protein rnfD [1.6.5.—] |
| 1755 | Electron transport complex protein rnfG (rnfG) |
| 1756 | Electron transport complex protein rnfE [1.6.5.—] |
| 1757 | endonuclease III (nth) [4.2.99.18] |
| 1758 | sodium-dependent transporter (SNF family) |
| 1759 | molybdenum ABC transporter, ATP-binding protein (modC) [3.6.3.29] |
| 1760 | molybdate ABC transporter, permease protein (modB) |
| 1761 | molybdenum ABC transporter, periplasmic molybdate-binding protein (modA) |
| 1762 | Transcriptional regulator modE (modE) |
| 1763 | unnamed protein product [2.—.—.—] |
| 1764 | glycosyltransferase [2.—.—.—] |
| 1765 | unnamed protein product [2.—.—.—] |
| 1766 | glycosyl transferase (putative) [2.—.—.—] |
| 1767 | 2.4.99.—[2.4.99.—] |
| 1768 | Polysaccharide biosynthesis protein domain protein |
| 1769 | Uncharacterized ACR, COG1434 family |
| 1770 | 5-methyltetrahydropteroyltriglutamate--homocysteine S-methyltransferase (metE) [2.1.1.14] |
| 1771 | predicted permease |
| 1772 | predicted permease |
| 1773 | Cytosol aminopeptidase (Leucine aminopeptidase) (LAP)(Leucyl aminopeptidase) (pepA) [3.4.11.1] |
| 1774 | transporter, BCCT family NMB1277 (betT) |
| 1775 | Sensor protein qseC [2.7.3.—] |
| 1776 | Transcriptional regulatory protein qseB |
| 1777 | conserved hypothetical protein TIGR00156 |
| 1778 | Pmi |
| 1779 | Pmi (PMI) [5.3.1.8] |
| 1780 | phosphotransferase system enzyme II, glucose-specific, factor III (crr) [2.7.1.69] |
| 1781 | phosphoenolpyruvate-protein phosphotransferase (ptsI) [2.7.3.9] |
| 1782 | Phosphocarrier protein HPr (Histidine-containing protein) (ptsH) [2.7.1.69] |
| 1783 | 3.6.1.—[3.6.1.—] |
| 1784 | Oligoribonuclease [3.1.—.—] |
| 1785 | undecaprenyl-phosphate alpha-N-acetylglucosaminyltransferase (rfe) [2.7.8.—] |
| 1786 | protein-P-II uridylyltransferase (glnD) [2.7.7.59] |
| 1787 | methionine aminopeptidase, type I (map) [3.4.11.18] |
| 1788 | Protein |
| 1789 | Uncharacterised protein family (UPF0231) superfamily |
| 1790 | penicillin-binding protein 1B (mrcB) |
| 1791 | hypothetical protein |
| 1792 | phosphoribosylaminoimidazole-succinocarboxamide synthase (purC) [6.3.2.6] |
| 1793 | argininosuccinate synthase (argG) [6.3.4.5] |
| 1794 | transporter protein |
| 1795 | Protein (lamB) |
| 1796 | urea amidolyase-related protein |
| 1797 | conserved hypothetical protein TIGR00370 |
| 1798 | hsf |
| 1799 | exoribonuclease II (rnb) [3.1.13.1] |
| 1800 | enoyl-[acyl-carrier-protein] reductase (NADH2) (fabI) [1.3.1.9] |
| 1801 | peptide chain release factor 3 (prfC) |
| 1802 | conserved hypothetical protein |
| 1803 | Branched-chain amino acid transport protein azlD (braE) |
| 1804 | branched-chain amino acid transport protein AzlC (azlC) |
| 1805 | HTH-type transcriptional regulator metR (metR) |
| 1806 | L-lactate dehydrogenase (Cytochrome) (lctD) [1.1.2.3] |
| 1807 | glutamate racemase (murI) [5.1.1.3] |
| 1808 | ATP-dependent DNA helicase RecG (recG) [3.6.1.—] |
| 1809 | Guanosine-3′,5′-bis(Diphosphate) 3′-pyrophosphohydrolase((ppGpp)ase) (Penta-phosphate guanosine-3′- |
| | pyrophosphohydrolase) (spoT) [3.1.7.2] |
| 1810 | DNA-directed RNA polymerase omega chain (RNAP omegasubunit) (Transcriptase omega chain) (RNA |
| | polymerase omega subunit) (rpoZ) [2.7.7.6] |
| 1811 | Guanylate kinase (GMP kinase) (gmk) [2.7.4.8] |
| 1812 | Glyceraldehyde 3-phosphate dehydrogenase (GAPDH) (gapdH) [1.2.1.12] |
| 1813 | conserved hypothetical protein |
| 1814 | conserved hypothetical protein |
| 1815 | conserved hypothetical protein |
| 1816 | fimbrial protein hifB |
| 1817 | Phage integrase family domain protein |
| 1818 | Phage integrase family domain protein |
| 1819 | conserved hypothetical protein |
| 1820 | AcrB/AcrD/AcrF family protein (AP001520) |
| 1821 | quinone oxidoreductase (Human) [1.1.1.—] |
| 1822 | arsenical-resistance protein acr3 |
| 1823 | regulatory protein (merR2) |
| 1824 | cation efflux family protein superfamily |
| 1825 | similar to possible arsenic resistance membrane protein ArsB (ArsB) |
| 1826 | arsenate reductase (arsC) [1.20.4.1] |
| 1827 | ArsR-like protein (AF173880) |
| 1828 | RC180 |
| 1829 | ParB-related protein |
| 1830 | conserved hypothetical protein |
| 1831 | predicted protein |
| 1832 | conserved hypothetical protein |
| 1833 | Minor fimbrial subunit hifE precursor |
| 1834 | Minor fimbrial subunit hifD precursor (pilA) |
| 1835 | Outer membrane usher protein hifC precursor |
| 1836 | hypothetical protein |
| 1837 | araC-type sugar metabolism regulator |
| 1838 | gp15 |
| 1839 | hypothetical protein |
| 1840 | hypothetical protein |
| 1841 | KIAA0853 protein, putative |
| 1842 | prophage pi1 protein 11, recombinase (P33) |
| 1843 | hypothetical protein |
| 1844 | single stranded DNA-binding protein (SSB) |
| 1845 | transcriptional regulator, Cro/Cl family |
| 1846 | hypothetical protein |
| 1847 | recombination endonuclease |
| 1848 | elongation factor Tu (EF-Tu) |
| 1849 | gene 50 protein |
| 1850 | P protein, putative |
| 1851 | Sb42 |
| 1852 | Roi |
| 1853 | phage regulatory protein YPO2100 |

[0167] REFERENCES (the contents of which are hereby incorporated by reference)
[0168] [1] Fleischmann et al. (1995) Science 269:496-512.
[0169] [2] GenBank accession NC_{—}000907.
[0170] [3] Geysen et al. (1984) PNAS USA 81:3998-4002.
[0171] [4] Carter (1994) Methods Mol Biol 36:207-23.
[0172] [5] Jameson, B A et al. 1988, CABIOS 4(1):181-186.
[0173] [6] Raddrizzani & Hammer (2000) Brief Bioinform 1(2):179-89.
[0174] [7] De Lalla et al. (1999) J. Immunol. 163:1725-29.
[0175] [8] Brusic et al (1998) Bioinformatics 14(2):121-30
[0176] [9] Meister et al. (1995) Vaccine 13(6):581-91.
[0177] [10] Roberts et al. (1996) AIDS Res Hum Retroviruses 12(7):593-610.
[0178] [11] Maksyutov & Zagrebelnaya (1993) Comput Appl Biosci 9(3):291-7.
[0179] [12] Feller & de la Cruz (1991) Nature 349(6311):720-1.
[0180] [13] Hopp (1993) Peptide Research 6:183-190.
[0181] [14] Welling et al. (1985) FEBS Lett. 188:215-218.
[0182] [15] Davenport et al. (1995) Immunogenetics 42:392-297.
[0183] [16] Bodanszky (1993) Principles of Peptide Synthesis (ISBN: 0387564314).
[0184] [17] Fields et al. (1997) Meth Enzymol 289: Solid-Phase Peptide Synthesis. ISBN: 0121821900.
[0185] [18] Chan & White (2000) Fmoc Solid Phase Peptide Synthesis. ISBN: 0199637245.
[0186] [19] Kullmann (1987) Enzymatic Peptide Synthesis. ISBN: 0849368413.
[0187] [20] Ibba (1996) Biotechnol Genet Eng Rev 13:197-216.
[0188] [21] Breedveld (2000) Lancet 355(9205):735-740.
[0189] [22] Gorman & Clark (1990) Semin. Immunol. 2:457-466.
[0190] [23] Sambrook et al. (1989) Molecular Cloning: A Laboratory Manual.
[0191] [24] Short protocols in molecular biology (4th ed, 1999) Ausubel et al. eds. ISBN 0-471-32938-X.
[0192] [25] U.S. Pat. No. 5,707,829
[0193] [26] Current Protocols in Molecular Biology (F. M. Ausubel et al. eds., 1987) Supplement 30.
[0194] [27] EP-B-0509612.
[0195] [28] EP-B-0505012.
[0196] [29] Yadav et al. (2003) Lett Appl Microbiol 37(3):190-5.
[0197] [30] Singhi et al. (2002) Ann Trop Paediatr 22(4):347-53.
[0198] [31] Tang et al. (1997) Clin. Chem. 43:2021-2038.
[0199] [32] Vaccine Design . . . (1995) eds. Powell & Newman. ISBN: 030644867X. Plenum.
[0200] [33] WO00/23105.
[0201] [34] WO90/14837.
[0202] [35] U.S. Pat. No. 5,057,540.
[0203] [36] WO96/33739.
[0204] [37] EP-A-01 09942.
[0205] [38] WO96/11711.
[0206] [39] WO00/07621.
[0207] [40] Barr et al. (1998) Advanced Drug Delivery Reviews 32:247-271.
[0208] [41] Sjolanderet et al. (1998) Advanced Drug Delivery Reviews 32:321-338.
[0209] [42] Niikura et al. (2002) Virology 293:273-280.
[0210] [43] Lenz et al. (2001) J Immunol 166:5346-5355.
[0211] [44] Pinto et al. (2003) J Infect Dis 188:327-338.
[0212] [45] Gerber et al. (2001) Virol 75:4752-4760.
[0213] [46] WO03/024480
[0214] [47] WO03/024481
[0215] [48] Gluck et al. (2002) Vaccine 20:B10-B16.
[0216] [49] EP-A-0689454.
[0217] [50] Johnson et al. (1999) Bioorg. Med Chem Lett 9:2273-2278.
[0218] [51] Evans et al. (2003) Expert Rev Vaccines 2:219-229.
[0219] [52] Meraldi et al. (2003) Vaccine 21:2485-2491.
[0220] [53] Pajak et al. (2003) Vaccine 21:836-842.
[0221] [54] Kandimalla et al. (2003) Nucleic Acids Research 31:2393-2400.
[0222] [55] WO02/26757.
[0223] [56] WO99/62923.
[0224] [57] Krieg (2003) Nature Medicine 9:831-835.
[0225] [58] McCluskie et al. (2002) FEMS Immunology and Medical Microbiology 32:179-185.
[0226] [59] WO98/40100.
[0227] [60] U.S. Pat. No. 6,207,646.
[0228] [61] U.S. Pat. No. 6,239,116.
[0229] [62] U.S. Pat. No. 6,429,199.
[0230] [63] Kandimalla et al. (2003) Biochemical Society Transactions 31 (part 3):654-658.
[0231] [64] Blackwell et al. (2003) J Immunol 170:4061-4068.
[0232] [65] Krieg (2002) Trends Immunol 23:64-65.
[0233] [66] WO01/95935.
[0234] [67] Kandimalla et al. (2003) BBRC 306:948-953.
[0235] [68] Bhagat et al. (2003) BBRC 300:853-861.
[0236] [69] WO03/035836.
[0237] [70] WO95/17211.
[0238] [71] WO98/42375.
[0239] [72] Beignon et al. (2002) Infect Immun 70:3012-3019.
[0240] [73] Pizza et al. (2001) Vaccine 19:2534-2541.
[0241] [74] Pizza et al. (2000) Int J Med Microbiol 290:455-461.
[0242] [75] Scharton-Kersten et al. (2000) Infect Immun 68:5306-5313.
[0243] [76] Ryan et al. (1999) Infect Immun 67:6270-6280.
[0244] [77] Partidos et al. (1999) Immunol Lett 67:209-216.
[0245] [78] Peppoloni et al. (2003) Expert Rev Vaccines 2:285-293.
[0246] [79] Pine et al. (2002) J Control Release 85:263-270.
[0247] [80] Domenighini et al. (1995) Mol Microbiol 15:1165-1167.
[0248] [81] WO99/40936.
[0249] [82] WO99/44636.
[0250] [83] Singh et al] (2001) J Cont Release 70:267-276.
[0251] [84] WO99/27960.
[0252] [85] U.S. Pat. No. 6,090,406
[0253] [86] U.S. Pat. No. 5,916,588
[0254] [87] EP-A-0626169.
[0255] [88] WO99/52549.
[0256] [89] WO01/21207.
[0257] [90] WO01/21152.
[0258] [91] Adrianov et al. (1998) Biomaterials 19:109-115.
[0259] [92] Payne et al. (1998) Adv Drug Delivery Review 31:185-196.
[0260] [93] Stanley (2002) Clin Exp Dermatol 27:571-577.
[0261] [94] Jones (2003) Curr Opin Investig Drugs 4:214-218.
[0262] [95] WO99/11241.
[0263] [96] WO94/00153.
[0264] [97] WO98/57659.
[0265] [98] European patent applications 0835318, 0735898 and 0761231.
[0266] [99] WO03/009869.
[0267] [100] Almeida & Alpar (1996) J. Drug Targeting 3:455-467.
[0268] [101] Agarwal & Mishra (1999) Indian J Exp Biol 37:6-16.
[0269] [102] Costantino et al. (1992) Vaccine 10:691-698.
[0270] [103] Costantino et al. (1999) Vaccine 17:1251-1263.
[0271] [104] International patent application WO03/007985.
[0272] [105] Watson (2000) Pediatr Infect Dis J 19:331-332.
[0273] [106] Rubin (2000) Pediatr Clin North Am 47:269-285, v.
[0274] [107] Jedrzejas (2001) Microbiol Mol Biol Rev 65:187-207.
[0275] [108] Bell (2000) Pediatr Infect Dis J 19:1187-1188.
[0276] [109] Iwarson (1995) APMIS 103:321-326.
[0277] [110] Gerlich et al. (1990) Vaccine 8 Suppl:S63-68 &79-80.
[0278] [111] Vaccines (1988) eds. Plotkin & Mortimer. ISBN 0-7216-1946-0.
[0279] [112] Del Guidice et al. (1998) Molecular Aspects of Medicine 19:1-70.
[0280] [113] Gustafsson et al. (1996) N. Engl. J. Med. 334:349-355.
[0281] [114] Rappuoli et al. (1991) TIBTECH 9:232-238.
[0282] [115] Sutter et al. (2000) Pediatr Clin North Am 47:287-308.
[0283] [116] Zimmerman & Spann (1999) Am Fam Physician 59:113-118, 125-126.
[0284] [117] McMichael (2000) Vaccine 19 Suppl 1:S101-107.
[0285] [118] Schuchat (1999) Lancet 353(9146):51-6.
[0286] [119] International patent application WO02/34771.
[0287] [120] Dale (1999) Infect Dis Clin North Am 13:227-43, viii.
[0288] [121] Ferretti et al. (2001) PNAS USA 98: 4658-4663.
[0289] [122] Kuroda et al. (2001) Lancet 357(9264):1225-1240; see also pages 1218-1219.
[0290] [123] EP-A-0372501
[0291] [124] EP-A-0378881
[0292] [125] EP-A-0427347
[0293] [126] WO93/17712
[0294] [127] WO94/03208
[0295] [128] WO98/58668
[0296] [129] EP-A-0471177
[0297] [130] EP-A-0594610.
[0298] [131] WO00/56360
[0299] [132] WO91/01146
[0300] [133] WO00/61761
[0301] [134] WO01/72337
[0302] [135] Falugi et al. (2001) Eur J Immunol 31:3816-3824.
[0303] [136] Baraldo et al, (2004) Infect Immmun. 72:4884-7
[0304] [137] WO02/091998.
[0305] [138] Kuo et al. (1995) Infect Immun 63:2706-13.
[0306] [139] Research Disclosure, 453077 (January 2002)
[0307] [140] Needleman& Wunsch (1970) J. Mol. Biol. 48, 443-453.
[0308] [141] Rice et al. (2000) Trends Genet 16:276-277.
[0309] [142] Gennaro (2000) Remington: The Science and Practice of Pharmacy. 20th edition, ISBN: 0683306472.
[0310] [143] Methods In Enzymology (S. Colowick and N. Kaplan, eds., Academic Press, Inc.)
[0311] [144] Handbook of Experimental Immunology, Vols. I-IV (D. M. Weir and C. C. Blackwell, eds., 1986, Blackwell Scientific Publications)
[0312] [145] Sambrook, et al., Molecular Cloning: A Laboratory Manual (2nd Edition, 1989).
[0313] [146] Handbook of Surface and Colloidal Chemistry (Birdi, K. S. ed., CRC Press, 1997)
[0314] [147] Short Protocols in Molecular Biology, 4th ed. (Ausubel et al. eds., 1999, John Wiley & Sons)
[0315] [148] Molecular Biology Techniques: An Intensive Laboratory Course, (Ream et al., eds., 1998, Academic Press)
[0316] [149] PCR (Introduction to Biotechniques Series), 2nd ed. (Newton & Graham eds., 1997, Springer Verlag)
[0317] [150] Erdile et al. (1993) Infect Immun 61:81-90.

1. A polypeptide comprising an amino acid sequence that has at least 75% sequence identity to one or more of SEQ ID NOS: 2, 4, 6, 8, 10, 12, 14, 16, 18, 20, 22, 24, 26, 28, 30, 32, 34, 36, 38, 40, 42, 44, 46, 48, 50, 52, 54, 56, 58, 60, 62, 64, 66, 68, 70, 72, 74, 76, 78, 80, 82, 84, 86, 88, 90, 92, 94, 96, 98, 100, 102, 104, 106, 108, 110, 112, 114, 116, 118, 120, 122, 124, 126, 128, 130, 132, 134, 136, 138, 140, 142, 144, 146, 148, 150, 152, 154, 156, 158, 160, 162, 164, 166, 168, 170, 172, 174, 176, 178, 180, 182, 184, 186, 188, 190, 192, 194, 196, 198, 200, 202, 204, 206, 208, 210, 212, 214, 216, 218, 220, 222, 224, 226, 228, 230, 232, 234, 236, 238, 240, 242, 244, 246, 248, 250, 252, 254, 256, 258, 260, 262, 264, 266, 268, 270, 272, 274, 276, 278, 280, 282, 284, 286, 288, 290, 292, 294, 296, 298, 300, 302, 304, 306, 308, 310, 312, 314, 316, 318, 320, 322, 324, 326, 328, 330, 332, 334, 336, 338, 340, 342, 344, 346, 348, 350, 352, 354, 356, 358, 360, 362, 364, 366, 368, 370, 372, 374, 376, 378, 380, 382, 384, 386, 388, 390, 392, 394, 396, 398, 400, 402, 404, 406, 408, 410, 412, 414, 416, 418, 420, 422, 424, 426, 428, 430, 432, 434, 436, 438, 440, 442, 444, 446, 448, 450, 452, 454, 456, 458, 460, 462, 464, 466, 468, 470, 472, 474, 476, 478, 480, 482, 484, 486, 488, 490, 492, 494, 496, 498, 500, 502, 504, 506, 508, 510, 512, 514, 516, 518, 520, 522, 524, 526, 528, 530, 532, 534, 536, 538, 540, 542, 544, 546, 548, 550, 552, 554, 556, 558, 560, 562, 564, 566, 568, 570, 572, 574, 576, 578, 580, 582, 584, 586, 588, 590, 592, 594, 596, 598, 600, 602, 604, 606, 608, 610, 612, 614, 616, 618, 620, 622, 624, 626, 628, 630, 632, 634, 636, 638, 640, 642, 644, 646, 648, 650, 652, 654, 656, 658, 660, 662, 664, 666, 668, 670, 672, 674, 676, 678, 680, 682, 684, 686, 688, 690, 692, 694, 696, 698, 700, 702, 704, 706, 708, 710, 712, 714, 716, 718, 720, 722, 724, 726, 728, 730, 732, 734, 736, 738, 740, 742, 744, 746, 748, 750, 752, 754, 756, 758, 760, 762, 764, 766, 768, 770, 772, 774, 776, 778, 780, 782, 784, 786, 788, 790, 792, 794, 796, 798, 800, 802, 804, 806, 808, 810, 812, 814, 816, 818, 820, 822, 824, 826, 828, 830, 832, 834, 836, 838, 840, 842, 844, 846, 848, 850, 852, 854, 856, 858, 860, 862, 864, 866, 868, 870, 872, 874, 876, 878, 880, 882, 884, 886, 888, 890, 892, 894, 896, 898, 900, 902, 904, 906, 908, 910, 912, 914, 916, 918, 920, 922, 924, 926, 928, 930, 932, 934, 936, 938, 940, 942, 944, 946, 948, 950, 952, 954, 956, 958, 960, 962, 964, 966, 968, 970, 972, 974, 976, 978, 980, 982, 984, 986, 988, 990, 992, 994, 996, 998, 1000, 1002, 1004, 1006, 1008, 1010, 1012, 1014, 1016, 1018, 1020, 1022, 1024, 1026, 1028, 1030, 1032, 1034, 1036, 1038, 1040, 1042, 1044, 1046, 1048, 1050, 1052, 1054, 1056, 1058, 1060, 1062, 1064, 1066, 1068, 1070, 1072, 1074, 1076, 1078, 1080, 1082, 1084, 1086, 1088, 1090, 1092, 1094, 1096, 1098, 1100, 1102, 1104, 1106, 1108, 1110, 1112, 1114, 1116, 1118, 1120, 1122, 1124, 1126, 1128, 1130, 1132, 1134, 1136, 1138, 1140, 1142, 1144, 1146, 1148, 1150, 1152, 1154, 1156, 1158, 1160, 1162, 1164, 1166, 1168, 1170, 1172, 1174, 1176, 1178, 1180, 1182, 1184, 1186, 1188, 1190, 1192, 1194, 1196, 1198, 1200, 1202, 1204, 1206, 1208, 1210, 1212, 1214, 1216, 1218, 1220, 1222, 1224, 1226, 1228, 1230, 1232, 1234, 1236, 1238, 1240, 1242, 1244, 1246, 1248, 1250, 1252, 1254, 1256, 1258, 1260, 1262, 1264, 1266, 1268, 1270, 1272, 1274, 1276, 1278, 1280, 1282, 1284, 1286, 1288, 1290, 1292, 1294, 1296, 1298, 1300, 1302, 1304, 1306, 1308, 1310, 1312, 1314, 1316, 1318, 1320, 1322, 1324, 1326, 1328, 1330, 1332, 1334, 1336, 1338, 1340, 1342, 1344, 1346, 1348, 1350, 1352, 1354, 1356, 1358, 1360, 1362, 1364, 1366, 1368, 1370, 1372, 1374, 1376, 1378, 1380, 1382, 1384, 1386, 1388, 1390, 1392, 1394, 1396, 1398, 1400, 1402, 1404, 1406, 1408, 1410, 1412, 1414, 1416, 1418, 1420, 1422, 1424, 1426, 1428, 1430, 1432, 1434, 1436, 1438, 1440, 1442, 1444, 1446, 1448, 1450, 1452, 1454, 1456, 1458, 1460, 1462, 1464, 1466, 1468, 1470, 1472, 1474, 1476, 1478, 1480, 1482, 1484, 1486, 1488, 1490, 1492, 1494, 1496, 1498, 1500, 1502, 1504, 1506, 1508, 1510, 1512, 1514, 1516, 1518, 1520, 1522, 1524, 1526, 1528, 1530, 1532, 1534, 1536, 1538, 1540, 1542, 1544, 1546, 1548, 1550, 1552, 1554, 1556, 1558, 1560, 1562, 1564, 1566, 1568, 1570, 1572, 1574, 1576, 1578, 1580, 1582, 1584, 1586, 1588, 1590, 1592, 1594, 1596, 1598, 1600, 1602, 1604, 1606, 1608, 1610, 1612, 1614, 1616, 1618, 1620, 1622, 1624, 1626, 1628, 1630, 1632, 1634, 1636, 1638, 1640, 1642, 1644, 1646, 1648, 1650, 1652, 1654, 1656, 1658, 1660, 1662, 1664, 1666, 1668, 1670, 1672, 1674, 1676, 1678, 1680, 1682, 1684, 1686, 1688, 1690, 1692, 1694, 1696, 1698, 1700, 1702, 1704, 1706, 1708, 1710, 1712, 1714, 1716, 1718, 1720, 1722, 1724, 1726, 1728, 1730, 1732, 1734, 1736, 1738, 1740, 1742, 1744, 1746, 1748, 1750, 1752, 1754, 1756, 1758, 1760, 1762, 1764, 1766, 1768, 1770, 1772, 1774, 1776, 1778, 1780, 1782, 1784, 1786, 1788, 1790, 1792, 1794, 1796, 1798, 1800, 1802, 1804, 1806, 1808, 1810, 1812, 1814, 1816, 1818, 1820, 1822, 1824, 1826, 1828, 1830, 1832, 1834, 1836, 1838, 1840, 1842, 1844, 1846, 1848, 1850, 1852, 1854, 1856, 1858, 1860, 1862, 1864, 1866, 1868, 1870, 1872, 1874, 1876, 1878, 1880, 1882, 1884, 1886, 1888, 1890, 1892, 1894, 1896, 1898, 1900, 1902, 1904, 1906, 1908, 1910, 1912, 1914, 1916, 1918, 1920, 1922, 1924, 1926, 1928, 1930, 1932, 1934, 1936, 1938, 1940, 1942, 1944, 1946, 1948, 1950, 1952, 1954, 1956, 1958, 1960, 1962, 1964, 1966, 1968, 1970, 1972, 1974, 1976, 1978, 1980, 1982, 1984, 1986, 1988, 1990, 1992, 1994, 1996, 1998, 2000, 2002, 2004, 2006, 2008, 2010, 2012, 2014, 2016, 2018, 2020, 2022, 2024, 2026, 2028, 2030, 2032, 2034, 2036, 2038, 2040, 2042, 2044, 2046, 2048, 2050, 2052, 2054, 2056, 2058, 2060, 2062, 2064, 2066, 2068, 2070, 2072, 2074, 2076, 2078, 2080, 2082, 2084, 2086, 2088, 2090, 2092, 2094, 2096, 2098, 2100, 2102, 2104, 2106, 2108, 2110, 2112, 2114, 2116, 2118, 2120, 2122, 2124, 2126, 2128, 2130, 2132, 2134, 2136, 2138, 2140, 2142, 2144, 2146, 2148, 2150, 2152, 2154, 2156, 2158, 2160, 2162, 2164, 2166, 2168, 2170, 2172, 2174, 2176, 2178, 2180, 2182, 2184, 2186, 2188, 2190, 2192, 2194, 2196, 2198, 2200, 2202, 2204, 2206, 2208, 2210, 2212, 2214, 2216, 2218, 2220, 2222, 2224, 2226, 2228, 2230, 2232, 2234, 2236, 2238, 2240, 2242, 2244, 2246, 2248, 2250, 2252, 2254, 2256, 2258, 2260, 2262, 2264, 2266, 2268, 2270, 2272, 2274, 2276, 2278, 2280, 2282, 2284, 2286, 2288, 2290, 2292, 2294, 2296, 2298, 2300, 2302, 2304, 2306, 2308, 2310, 2312, 2314, 2316, 2318, 2320, 2322, 2324, 2326, 2328, 2330, 2332, 2334, 2336, 2338, 2340, 2342, 2344, 2346, 2348, 2350, 2352, 2354, 2356, 2358, 2360, 2362, 2364, 2366, 2368, 2370, 2372, 2374, 2376, 2378, 2380, 2382, 2384, 2386, 2388, 2390, 2392, 2394, 2396, 2398, 2400, 2462, 2404, 2406, 2408, 2410, 2412, 2414, 2416, 2418, 2420, 2422, 2424, 2426, 2428, 2430, 2432, 2434, 2436, 2438, 2440, 2442, 2444, 2446, 2448, 2450, 2452, 2454, 2456, 2458, 2460, 2462, 2464, 2466, 2468, 2470, 2472, 2474, 2476, 2478, 2480, 2482, 2484, 2486, 2488, 2490, 2492, 2494, 2496, 2498, 2500, 2502, 2504, 2506, 2508, 2510, 2512, 2514, 2516, 2518, 2520, 2522, 2524, 2526, 2528, 2530, 2532, 2534, 2536, 2538, 2540, 2542, 2544, 2546, 2548, 2550, 2552, 2554, 2556, 2558, 2560, 2562, 2564, 2566, 2568, 2570, 2572, 2574, 2576, 2578, 2580, 2582, 2584, 2586, 2588, 2590, 2592, 2594, 2596, 2598, 2600, 2602, 2604, 2606, 2608, 2610, 2612, 2614, 2616, 2618, 2620, 2622, 2624, 2626, 2628, 2630, 2632, 2634, 2636, 2638, 2640, 2642, 2644, 2646, 2648, 2650, 2652, 2654, 2656, 2658, 2660, 2662, 2664, 2666, 2668, 2670, 2672, 2674, 2676, 2678, 2680, 2682, 2684, 2686, 2688, 2690, 2692, 2694, 2696, 2698, 2700, 2702, 2704, 2706, 2708, 2710, 2712, 2714, 2716, 2718, 2720, 2722, 2724, 2726, 2728, 2730, 2732, 2734, 2736, 2738, 2740, 2742, 2744, 2746, 2748, 2750, 2752, 2754, 2756, 2758, 2760, 2762, 2764, 2766, 2768, 2770, 2772, 2774, 2776, 2778, 2780, 2782, 2784, 2786, 2788, 2790, 2792, 2794, 2796, 2798, 2800, 2802, 2804, 2806, 2808, 2810, 2812, 2814, 2816, 2818, 2820, 2822, 2824, 2826, 2828, 2830, 2832, 2834, 2836, 2838, 2840, 2842, 2844, 2846, 2848, 2850, 2852, 2854, 2856, 2858, 2860, 2862, 2864, 2866, 2868, 2870, 2872, 2874, 2876, 2878, 2880, 2882, 2884, 2886, 2888, 2890, 2892, 2894, 2896, 2898, 2900, 2902, 2904, 2906, 2908, 2910, 2912, 2914, 2916, 2918, 2920, 2922, 2924, 2926, 2928, 2930, 2932, 2934, 2936, 2938, 2940, 2942, 2944, 2946, 2948, 2950, 2952, 2954, 2956, 2958, 2960, 2962, 2964, 2966, 2968, 2970, 2972, 2974, 2976, 2978, 2980, 2982, 2984, 2986, 2988, 2990, 2992, 2994, 2996, 2998, 3000, 3002, 3004, 3006, 3008, 3010, 3012, 3014, 3016, 3018, 3020, 3022, 3024, 3026, 3028, 3030, 3032, 3034, 3036, 3038, 3040, 3042, 3044, 3046, 3048, 3050, 3052, 3054, 3056, 3058, 3060, 3062, 3064, 3066, 3068, 3070, 3072, 3074, 3076, 3078, 3080, 3082, 3084, 3086, 3088, 3090, 3092, 3094, 3096, 3098, 3100, 3102, 3104, 3106, 3108, 3110, 3112, 3114, 3116, 3118, 3120, 3122, 3124, 3126, 3128, 3130, 3132, 3134, 3136, 3138, 3140, 3142, 3144, 3146, 3148, 3150, 3152, 3154, 3156, 3158, 3160, 3162, 3164, 3166, 3168, 3170, 3172, 3174, 3176, 3178, 3180, 3182, 3184, 3186, 3188, 3190, 3192, 3194, 3196, 3198, 3200, 3202, 3204, 3206, 3208, 3210, 3212, 3214, 3216, 3218, 3220, 3222, 3224, 3226, 3228, 3230, 3232, 3234, 3236, 3238, 3240, 3242, 3244, 3246, 3248, 3250, 3252, 3254, 3256, 3258, 3260, 3262, 3264, 3266, 3268, 3270, 3272, 3274, 3276, 3278, 3280, 3282, 3284, 3286, 3288, 3290, 3292, 3294, 3296, 3298, 3300, 3302, 3304, 3306, 3308, 3310, 3312, 3314, 3316, 3318, 3320, 3322, 3324, 3326, 3328, 3330, 3332, 3334, 3336, 3338, 3340, 3342, 3344, 3346, 3348, 3350, 3352, 3354, 3356, 3358, 3360, 3362, 3364, 3366, 3368, 3370, 3372, 3374, 3376, 3378, 3380, 3382, 3384, 3386, 3388, 3390, 3392, 3394, 3396, 3398, 3400, 3402, 3404, 3406, 3408, 3410, 3412, 3414, 3416, 3418, 3420, 3422, 3424, 3426, 3428, 3430, 3432, 3434, 3436, 3438, 3440, 3442, 3444, 3446, 3448, 3450, 3452, 3454, 3456, 3458, 3460, 3462, 3464, 3466, 3468, 3470, 3472, 3474, 3476, 3478, 3480, 3482, 3484, 3486, 3488, 3490, 3492, 3494, 3496, 3498, 3500, 3502, 3504, 3506, 3508, 3510, 3512, 3514, 3516, 3518, 3520, 3522, 3524, 3526, 3528, 3530, 3532, 3534, 3536, 3538, 3540, 3542, 3544, 3546, 3548, 3550, 3552, 3554, 3556, 3558, 3560, 3562, 3564, 3566, 3568, 3570, 3572, 3574, 3576, 3578, 3580, 3582, 3584, 3586, 3588, 3590, 3592, 3594, 3596, 3598, 3600, 3602, 3604, 3606, 3608, 3610, 3612, 3614, 3616, 3618, 3620, 3622, 3624, 3626, 3628, 3630, 3632, 3634, 3636, 3638, 3640, 3642, 3644, 3646, 3648, 3650, 3652, 3654, 3656, 3658, 3660, 3662, 3664, 3666, 3668, 3670, 3672, 3674, 3676, 3678, 3680, 3682, 3684, 3686, 3688, 3690, 3692, 3694, 3696, 3698, 3700, 3702, 3704, 3706.

2. The polypeptide of claim 1, comprising one or more of amino acid sequences SEQ ID NOS: 2, 4, 6, 8, 10, 12, 14, 16, 18, 20, 22, 24, 26, 28, 30, 32, 34, 36, 38, 40, 42, 44, 46, 48, 50, 52, 54, 56, 58, 60, 62, 64, 66, 68, 70, 72, 74, 76, 78, 80, 82, 84, 86, 88, 90, 92, 94, 96, 98, 100, 102, 104, 106, 108, 110, 112, 114, 116, 118, 120, 122, 124, 126, 128, 130, 132, 134, 136, 138, 140, 142, 144, 146, 148, 150, 152, 154, 156, 158, 160, 162, 164, 166, 168, 170, 172, 174, 176, 178, 180, 182, 184, 186, 188, 190, 192, 194, 196, 198, 200, 202, 204, 206, 208, 210, 212, 214, 216, 218, 220, 222, 224, 226, 228, 230, 232, 234, 236, 238, 240, 242, 244, 246, 248, 250, 252, 254, 256, 258, 260, 262, 264, 266, 268, 270, 272, 274, 276, 278, 280, 282, 284, 286, 288, 290, 292, 294, 296, 298, 300, 302, 304, 306, 308, 310, 312, 314, 316, 318, 320, 322, 324, 326, 328, 330, 332, 334, 336, 338, 340, 342, 344, 346, 348, 350, 352, 354, 356, 358, 360, 362, 364, 366, 368, 370, 372, 374, 376, 378, 380, 382, 384, 386, 388, 390, 392, 394, 396, 398, 400, 402, 404, 406, 408, 410, 412, 414, 416, 418, 420, 422, 424, 426, 428, 430, 432, 434, 436, 438, 440, 442, 444, 446, 448, 450, 452, 454, 456, 458, 460, 462, 464, 466, 468, 470, 472, 474, 476, 478, 480, 482, 484, 486, 488, 490, 492, 494, 496, 498, 500, 502, 504, 506, 508, 510, 512, 514, 516, 518, 520, 522, 524, 526, 528, 530, 532, 534, 536, 538, 540, 542, 544, 546, 548, 550, 552, 554, 556, 558, 560, 562, 564, 566, 568, 570, 572, 574, 576, 578, 580, 582, 584, 586, 588, 590, 592, 594, 596, 598, 600, 602, 604, 606, 608, 610, 612, 614, 616, 618, 620, 622, 624, 626, 628, 630, 632, 634, 636, 638, 640, 642, 644, 646, 648, 650, 652, 654, 656, 658, 660, 662, 664, 666, 668, 670, 672, 674, 676, 678, 680, 682, 684, 686, 688, 690, 692, 694, 696, 698, 700, 702, 704, 706, 708, 710, 712, 714, 716, 718, 720, 722, 724, 726, 728, 730, 732, 734, 736, 738, 740, 742, 744, 746, 748, 750, 752, 754, 756, 758, 760, 762, 764, 766, 768, 770, 772, 774, 776, 778, 780, 782, 784, 786, 788, 790, 792, 794, 796, 798, 800, 802, 804, 806, 808, 810, 812, 814, 816, 818, 820, 822, 824, 826, 828, 830, 832, 834, 836, 838, 840, 842, 844, 846, 848, 850, 852, 854, 856, 858, 860, 862, 864, 866, 868, 870, 872, 874, 876, 878, 880, 882, 884, 886, 888, 890, 892, 894, 896, 898, 900, 902, 904, 906, 908, 910, 912, 914, 916, 918, 920, 922, 924, 926, 928, 930, 932, 934, 936, 938, 940, 942, 944, 946, 948, 950, 952, 954, 956, 958, 960, 962, 964, 966, 968, 970, 972, 974, 976, 978, 980, 982, 984, 986, 988, 990, 992, 994, 996, 998, 1000, 1002, 1004, 1006, 1008, 1010, 1012, 1014, 1016, 1018, 1020, 1022, 1024, 1026, 1028, 1030, 1032, 1034, 1036, 1038, 1040, 1042, 1044, 1046, 1048, 1050, 1052, 1054, 1056, 1058, 1060, 1062, 1064, 1066, 1068, 1070, 1072, 1074, 1076, 1078, 1080, 1082, 1084, 1086, 1088, 1090, 1092, 1094, 1096, 1098, 1100, 1102, 1104, 1106, 1108, 1110, 1112, 1114, 1116, 1118, 1120, 1122, 1124, 1126, 1128, 1130, 1132, 1134, 1136, 1138, 1140, 1142, 1144, 1146, 1148, 1150, 1152, 1154, 1156, 1158, 1160, 1162, 1164, 1166, 1168, 1170, 1172, 1174, 1176, 1178, 1180, 1182, 1184, 1186, 1188, 1190, 1192, 1194, 1196, 1198, 1200, 1202, 1204, 1206, 1208, 1210, 1212, 1214, 1216, 1218, 1220, 1222, 1224, 1226, 1228, 1230, 1232, 1234, 1236, 1238, 1240, 1242, 1244, 1246, 1248, 1250, 1252, 1254, 1256, 1258, 1260, 1262, 1264, 1266, 1268, 1270, 1272, 1274, 1276, 1278, 1280, 1282, 1284, 1286, 1288, 1290, 1292, 1294, 1296, 1298, 1300, 1302, 1304, 1306, 1308, 1310, 1312, 1314, 1316, 1318, 1320, 1322, 1324, 1326, 1328, 1330, 1332, 1334, 1336, 1338, 1340, 1342, 1344, 1346, 1348, 1350, 1352, 1354, 1356, 1358, 1360, 1362, 1364, 1366, 1368, 1370, 1372, 1374, 1376, 1378, 1380, 1382, 1384, 1386, 1388, 1390, 1392, 1394, 1396, 1398, 1400, 1402, 1404, 1406, 1408, 1410, 1412, 1414, 1416, 1418, 1420, 1422, 1424, 1426, 1428, 1430, 1432, 1434, 1436, 1438, 1440, 1442, 1444, 1446, 1448, 1450, 1452, 1454, 1456, 1458, 1460, 1462, 1464, 1466, 1468, 1470, 1472, 1474, 1476, 1478, 1480, 1482, 1484, 1486, 1488, 1490, 1492, 1494, 1496, 1498, 1500, 1502, 1504, 1506, 1508, 1510, 1512, 1514, 1516, 1518, 1520, 1522, 1524, 1526, 1528, 1530, 1532, 1534, 1536, 1538, 1540, 1542, 1544, 1546, 1548, 1550, 1552, 1554, 1556, 1558, 1560, 1562, 1564, 1566, 1568, 1570, 1572, 1574, 1576, 1578, 1580, 1582, 1584, 1586, 1588, 1590, 1592, 1594, 1596, 1598, 1600, 1602, 1604, 1606, 1608, 1610, 1612, 1614, 1616, 1618, 1620, 1622, 1624, 1626, 1628, 1630, 1632, 1634, 1636, 1638, 1640, 1642, 1644, 1646, 1648, 1650, 1652, 1654, 1656, 1658, 1660, 1662, 1664, 1666, 1668, 1670, 1672, 1674, 1676, 1678, 1680, 1682, 1684, 1686, 1688, 1690, 1692, 1694, 1696, 1698, 1700, 1702, 1704, 1706, 1708, 1710, 1712, 1714, 1716, 1718, 1720, 1722, 1724, 1726, 1728, 1730, 1732, 1734, 1736, 1738, 1740, 1742, 1744, 1746, 1748, 1750, 1752, 1754, 1756, 1758, 1760, 1762, 1764, 1766, 1768, 1770, 1772, 1774, 1776, 1778, 1780, 1782, 1784, 1786, 1788, 1790, 1792, 1794, 1796, 1798, 1800, 1802, 1804, 1806, 1808, 1810, 1812, 1814, 1816, 1818, 1820, 1822, 1824, 1826, 1828, 1830, 1832, 1834, 1836, 1838, 1840, 1842, 1844, 1846, 1848, 1850, 1852, 1854, 1856, 1858, 1860, 1862, 1864, 1866, 1868, 1870, 1872, 1874, 1876, 1878, 1880, 1882, 1884, 1886, 1888, 1890, 1892, 1894, 1896, 1898, 1900, 1902, 1904, 1906, 1908, 1910, 1912, 1914, 1916, 1918, 1920, 1922, 1924, 1926, 1928, 1930, 1932, 1934, 1936, 1938, 1940, 1942, 1944, 1946, 1948, 1950, 1952, 1954, 1956, 1958, 1960, 1962, 1964, 1966, 1968, 1970, 1972, 1974, 1976, 1978, 1980, 1982, 1984, 1986, 1988, 1990, 1992, 1994, 1996, 1998, 2000, 2002, 2004, 2006, 2008, 2010, 2012, 2014, 2016, 2018, 2020, 2022, 2024, 2026, 2028, 2030, 2032, 2034, 2036, 2038, 2040, 2042, 2044, 2046, 2048, 2050, 2052, 2054, 2056, 2058, 2060, 2062, 2064, 2066, 2068, 2070, 2072, 2074, 2076, 2078, 2080, 2082, 2084, 2086, 2088, 2090, 2092, 2094, 2096, 2098, 2100, 2102, 2104, 2106, 2108, 2110, 2112, 2114, 2116, 2118, 2120, 2122, 2124, 2126, 2128, 2130, 2132, 2134, 2136, 2138, 2140, 2142, 2144, 2146, 2148, 2150, 2152, 2154, 2156, 2158, 2160, 2162, 2164, 2166, 2168, 2170, 2172, 2174, 2176, 2178, 2180, 2182, 2184, 2186, 2188, 2190, 2192, 2194, 2196, 2198, 2200, 2202, 2204, 2206, 2208, 2210, 2212, 2214, 2216, 2218, 2220, 2222, 2224, 2226, 2228, 2230, 2232, 2234, 2236, 2238, 2240, 2242, 2244, 2246, 2248, 2250, 2252, 2254, 2256, 2258, 2260, 2262, 2264, 2266, 2268, 2270, 2272, 2274, 2276, 2278, 2280, 2282, 2284, 2286, 2288, 2290, 2292, 2294, 2296, 2298, 2300, 2302, 2304, 2306, 2308, 2310, 2312, 2314, 2316, 2318, 2320, 2322, 2324, 2326, 2328, 2330, 2332, 2334, 2336, 2338, 2340, 2342, 2344, 2346, 2348, 2350, 2352, 2354, 2356, 2358, 2360, 2362, 2364, 2366, 2368, 2370, 2372, 2374, 2376, 2378, 2380, 2382, 2384, 2386, 2388, 2390, 2392, 2394, 2396, 2398, 2400, 2402, 2404, 2406, 2408, 2410, 2412, 2414, 2416, 2418, 2420, 2422, 2424, 2426, 2428, 2430, 2432, 2434, 2436, 2438, 2440, 2442, 2444, 2446, 2448, 2450, 2452, 2454, 2456, 2458, 2460, 2462, 2464, 2466, 2468, 2470, 2472, 2474, 2476, 2478, 2480, 2482, 2484, 2486, 2488, 2490, 2492, 2494, 2496, 2498, 2500, 2502, 2504, 2506, 2508, 2510, 2512, 2514, 2516, 2518, 2520, 2522, 2524, 2526, 2528, 2530, 2532, 2534, 2536, 2538, 2540, 2542, 2544, 2546, 2548, 2550, 2552, 2554, 2556, 2558, 2560, 2562, 2564, 2566, 2568, 2570, 2572, 2574, 2576, 2578, 2580, 2582, 2584, 2586, 2588, 2590, 2592, 2594, 2596, 2598, 2600, 2602, 2604, 2606, 2608, 2610, 2612, 2614, 2616, 2618, 2620, 2622, 2624, 2626, 2628, 2630, 2632, 2634, 2636, 2638, 2640, 2642, 2644, 2646, 2648, 2650, 2652, 2654, 2656, 2658, 2660, 2662, 2664, 2666, 2668, 2670, 2672, 2674, 2676, 2678, 2680, 2682, 2684, 2686, 2688, 2690, 2692, 2694, 2696, 2698, 2700, 2702, 2704, 2706, 2708, 2710, 2712, 2714, 2716, 2718, 2720, 2722, 2724, 2726, 2728, 2730, 2732, 2734, 2736, 2738, 2740, 2742, 2744, 2746, 2748, 2750, 2752, 2754, 2756, 2758, 2760, 2762, 2764, 2766, 2768, 2770, 2772, 2774, 2776, 2778, 2780, 2782, 2784, 2786, 2788, 2790, 2792, 2794, 2796, 2798, 2800, 2802, 2804, 2806, 2808, 2810, 2812, 2814, 2816, 2818, 2820, 2822, 2824, 2826, 2828, 2830, 2832, 2834, 2836, 2838, 2840, 2842, 2844, 2846, 2848, 2850, 2852, 2854, 2856, 2858, 2860, 2862, 2864, 2866, 2868, 2870, 2872, 2874, 2876, 2878, 2880, 2882, 2884, 2886, 2888, 2890, 2892, 2894, 2896, 2898, 2900, 2902, 2904, 2906, 2908, 2910, 2912, 2914, 2916, 2918, 2920, 2922, 2924, 2926, 2928, 2930, 2932, 2934, 2936, 2938, 2940, 2942, 2944, 2946, 2948, 2950, 2952, 2954, 2956, 2958, 2960, 2962, 2964, 2966, 2968, 2970, 2972, 2974, 2976, 2978, 2980, 2982, 2984, 2986, 2988, 2990, 2992, 2994, 2996, 2998, 3000, 3002, 3004, 3006, 3008, 3010, 3012, 3014, 3016, 3018, 3020, 3022, 3024, 3026, 3028, 3030, 3032, 3034, 3036, 3038, 3040, 3042, 3044, 3046, 3048, 3050, 3052, 3054, 3056, 3058, 3060, 3062, 3064, 3066, 3068, 3070, 3072, 3074, 3076, 3078, 3080, 3082, 3084, 3086, 3088, 3090, 3092, 3094, 3096, 3098, 3100, 3102, 3104, 3106, 3108, 3110, 3112, 3114, 3116, 3118, 3120, 3122, 3124, 3126, 3128, 3130, 3132, 3134, 3136, 3138, 3140, 3142, 3144, 3146, 3148, 3150, 3152, 3154, 3156, 3158, 3160, 3162, 3164, 3166, 3168, 3170, 3172, 3174, 3176, 3178, 3180, 3182, 3184, 3186, 3188, 3190, 3192, 3194, 3196, 3198, 3200, 3202, 3204, 3206, 3208, 3210, 3212, 3214, 3216, 3218, 3220, 3222, 3224, 3226, 3228, 3230, 3232, 3234, 3236, 3238, 3240, 3242, 3244, 3246, 3248, 3250, 3252, 3254, 3256, 3258, 3260, 3262, 3264, 3266, 3268, 3270, 3272, 3274, 3276, 3278, 3280, 3282, 3284, 3286, 3288, 3290, 3292, 3294, 3296, 3298, 3300, 3302, 3304, 3306, 3308, 3310, 3312, 3314, 3316, 3318, 3320, 3322, 3324, 3326, 3328, 3330, 3332, 3334, 3336, 3338, 3340, 3342, 3344, 3346, 3348, 3350, 3352, 3354, 3356, 3358, 3360, 3362, 3364, 3366, 3368, 3370, 3372, 3374, 3376, 3378, 3380, 3382, 3384, 3386, 3388, 3390, 3392, 3394, 3396, 3398, 3400, 3402, 3404, 3406, 3408, 3410, 3412, 3414, 3416, 3418, 3420, 3422, 3424, 3426, 3428, 3430, 3432, 3434, 3436, 3438, 3440, 3442, 3444, 3446, 3448, 3450, 3452, 3454, 3456, 3458, 3460, 3462, 3464, 3466, 3468, 3470, 3472, 3474, 3476, 3478, 3480, 3482, 3484, 3486, 3488, 3490, 3492, 3494, 3496, 3498, 3500, 3502, 3504, 3506, 3508, 3510, 3512, 3514, 3516, 3518, 3520, 3522, 3524, 3526, 3528, 3530, 3532, 3534, 3536, 3538, 3540, 3542, 3544, 3546, 3548, 3550, 3552, 3554, 3556, 3558, 3560, 3562, 3564, 3566, 3568, 3570, 3572, 3574, 3576, 3578, 3580, 3582, 3584, 3586, 3588, 3590, 3592, 3594, 3596, 3598, 3600, 3602, 3604, 3606, 3608, 3610, 3612, 3614, 3616, 3618, 3620, 3622, 3624, 3626, 3628, 3630, 3632, 3634, 3636, 3638, 3640, 3642, 3644, 3646, 3648, 3650, 3652, 3654, 3656, 3658, 3660, 3662, 3664, 3666, 3668, 3670, 3672, 3674, 3676, 3678, 3680, 3682, 3684, 3686, 3688, 3690, 3692, 3694, 3696, 3698, 3700, 3702, 3704, 3706.

3. A polypeptide comprising a fragment of at least 7 consecutive amino acids from one or more of SEQ ID NOS: 2, 4, 6, 8, 10, 12, 14, 16, 18, 20, 22, 24, 26, 28, 30, 32, 34, 36, 38, 40, 42, 44, 46, 48, 50, 52, 54, 56, 58, 60, 62, 64, 66, 68, 70, 72, 74, 76, 78, 80, 82, 84, 86, 88, 90, 92, 94, 96, 98, 100, 102, 104, 106, 108, 110, 112, 114, 116, 118, 120, 122, 124, 126, 128, 130, 132, 134, 136, 138, 140, 142, 144, 146, 148, 150, 152, 154, 156, 158, 160, 162, 164, 166, 168, 170, 172, 174, 176, 178, 180, 182, 184, 186, 188, 190, 192, 194, 196, 198, 200, 202, 204, 206, 208, 210, 212, 214, 216, 218, 220, 222, 224, 226, 228, 230, 232, 234, 236, 238, 240, 242, 244, 246, 248, 250, 252, 254, 256, 258, 260, 262, 264, 266, 268, 270, 272, 274, 276, 278, 280, 282, 284, 286, 288, 290, 292, 294, 296, 298, 300, 302, 304, 306, 308, 310, 312, 314, 316, 318, 320, 322, 324, 326, 328, 330, 332, 334, 336, 338, 340, 342, 344, 346, 348, 350, 352, 354, 356, 358, 360, 362, 364, 366, 368, 370, 372, 374, 376, 378, 380, 382, 384, 386, 388, 390, 392, 394, 396, 398, 400, 402, 404, 406, 408, 410, 412, 414, 416, 418, 420, 422, 424, 426, 428, 430, 432, 434, 436, 438, 440, 442, 444, 446, 448, 450, 452, 454, 456, 458, 460, 462, 464, 466, 468, 470, 472, 474, 476, 478, 480, 482, 484, 486, 488, 490, 492, 494, 496, 498, 500, 502, 504, 506, 508, 510, 512, 514, 516, 518, 520, 522, 524, 526, 528, 530, 532, 534, 536, 538, 540, 542, 544, 546, 548, 550, 552, 554, 556, 558, 560, 562, 564, 566, 568, 570, 572, 574, 576, 578, 580, 582, 584, 586, 588, 590, 592, 594, 596, 598, 600, 602, 604, 606, 608, 610, 612, 614, 616, 618, 620, 622, 624, 626, 628, 630, 632, 634, 636, 638, 640, 642, 644, 646, 648, 650, 652, 654, 656, 658, 660, 662, 664, 666, 668, 670, 672, 674, 676, 678, 680, 682, 684, 686, 688, 690, 692, 694, 696, 698, 700, 702, 704, 706, 708, 710, 712, 714, 716, 718, 720, 722, 724, 726, 728, 730, 732, 734, 736, 738, 740, 742, 744, 746, 748, 750, 752, 754, 756, 758, 760, 762, 764, 766, 768, 770, 772, 774, 776, 778, 780, 782, 784, 786, 788, 790, 792, 794, 796, 798, 800, 802, 804, 806, 808, 810, 812, 814, 816, 818, 820, 822, 824, 826, 828, 830, 832, 834, 836, 838, 840, 842, 844, 846, 848, 850, 852, 854, 856, 858, 860, 862, 864, 866, 868, 870, 872, 874, 876, 878, 880, 882, 884, 886, 888, 890, 892, 894, 896, 898, 900, 902, 904, 906, 908, 910, 912, 914, 916, 918, 920, 922, 924, 926, 928, 930, 932, 934, 936, 938, 940, 942, 944, 946, 948, 950, 952, 954, 956, 958, 960, 962, 964, 966, 968, 970, 972, 974, 976, 978, 980, 982, 984, 986, 988, 990, 992, 994, 996, 998, 1000, 1002, 1004, 1006, 1008, 1010, 1012, 1014, 1016, 1018, 1020, 1022, 1024, 1026, 1028, 1030, 1032, 1034, 1036, 1038, 1040, 1042, 1044, 1046, 1048, 1050, 1052, 1054, 1056, 1058, 1060, 1062, 1064, 1066, 1068, 1070, 1072, 1074, 1076, 1078, 1080, 1082, 1084, 1086, 1088, 1090, 1092, 1094, 1096, 1098, 1100, 1102, 1104, 1106, 1108, 1110, 1112, 1114, 1116, 1118, 1120, 1122, 1124, 1126, 1128, 1130, 1132, 1134, 1136, 1138, 1140, 1142, 1144, 1146, 1148, 1150, 1152, 1154, 1156, 1158, 1160, 1162, 1164, 1166, 1168, 1170, 1172, 1174, 1176, 1178, 1180, 1182, 1184, 1186, 1188, 1190, 1192, 1194, 1196, 1198, 1200, 1202, 1204, 1206, 1208, 1210, 1212, 1214, 1216, 1218, 1220, 1222, 1224, 1226, 1228, 1230, 1232, 1234, 1236, 1238, 1240, 1242, 1244, 1246, 1248, 1250, 1252, 1254, 1256, 1258, 1260, 1262, 1264, 1266, 1268, 1270, 1272, 1274, 1276, 1278, 1280, 1282, 1284, 1286, 1288, 1290, 1292, 1294, 1296, 1298, 1300, 1302, 1304, 1306, 1308, 1310, 1312, 1314, 1316, 1318, 1320, 1322, 1324, 1326, 1328, 1330, 1332, 1334, 1336, 1338, 1340, 1342, 1344, 1346, 1348, 1350, 1352, 1354, 1356, 1358, 1360, 1362, 1364, 1366, 1368, 1370, 1372, 1374, 1376, 1378, 1380, 1382, 1384, 1386, 1388, 1390, 1392, 1394, 1396, 1398, 1400, 1402, 1404, 1406, 1408, 1410, 1412, 1414, 1416, 1418, 1420, 1422, 1424, 1426, 1428, 1430, 1432, 1434, 1436, 1438, 1440, 1442, 1444, 1446, 1448, 1450, 1452, 1454, 1456, 1458, 1460, 1462, 1464, 1466, 1468, 1470, 1472, 1474, 1476, 1478, 1480, 1482, 1484, 1486, 1488, 1490, 1492, 1494, 1496, 1498, 1500, 1502, 1504, 1506, 1508, 1510, 1512, 1514, 1516, 1518, 1520, 1522, 1524, 1526, 1528, 1530, 1532, 1534, 1536, 1538, 1540, 1542, 1544, 1546, 1548, 1550, 1552, 1554, 1556, 1558, 1560, 1562, 1564, 1566, 1568, 1570, 1572, 1574, 1576, 1578, 1580, 1582, 1584, 1586, 1588, 1590, 1592, 1594, 1596, 1598, 1600, 1602, 1604, 1606, 1608, 1610, 1612, 1614, 1616, 1618, 1620, 1622, 1624, 1626, 1628, 1630, 1632, 1634, 1636, 1638, 1640, 1642, 1644, 1646, 1648, 1650, 1652, 1654, 1656, 1658, 1660, 1662, 1664, 1666, 1668, 1670, 1672, 1674, 1676, 1678, 1680, 1682, 1684, 1686, 1688, 1690, 1692, 1694, 1696, 1698, 1700, 1702, 1704, 1706, 1708, 1710, 1712, 1714, 1716, 1718, 1720, 1722, 1724, 1726, 1728, 1730, 1732, 1734, 1736, 1738, 1740, 1742, 1744, 1746, 1748, 1750, 1752, 1754, 1756, 1758, 1760, 1762, 1764, 1766, 1768, 1770, 1772, 1774, 1776, 1778, 1780, 1782, 1784, 1786, 1788, 1790, 1792, 1794, 1796, 1798, 1800, 1802, 1804, 1806, 1808, 1810, 1812, 1814, 1816, 1818, 1820, 1822, 1824, 1826, 1828, 1830, 1832, 1834, 1836, 1838, 1840, 1842, 1844, 1846, 1848, 1850, 1852, 1854, 1856, 1858, 1860, 1862, 1864, 1866, 1868, 1870, 1872, 1874, 1876, 1878, 1880, 1882, 1884, 1886, 1888, 1890, 1892, 1894, 1896, 1898, 1900, 1902, 1904, 1906, 1908, 1910, 1912, 1914, 1916, 1918, 1920, 1922, 1924, 1926, 1928, 1930, 1932, 1934, 1936, 1938, 1940, 1942, 1944, 1946, 1948, 1950, 1952, 1954, 1956, 1958, 1960, 1962, 1964, 1966, 1968, 1970, 1972, 1974, 1976, 1978, 1980, 1982, 1984, 1986, 1988, 1990, 1992, 1994, 1996, 1998, 2000, 2002, 2004, 2006, 2008, 2010, 2012, 2014, 2016, 2018, 2020, 2022, 2024, 2026, 2028, 2030, 2032, 2034, 2036, 2038, 2040, 2042, 2044, 2046, 2048, 2050, 2052, 2054, 2056, 2058, 2060, 2062, 2064, 2066, 2068, 2070, 2072, 2074, 2076, 2078, 2080, 2082, 2084, 2086, 2088, 2090, 2092, 2094, 2096, 2098, 2100, 2102, 2104, 2106, 2108, 2110, 2112, 2114, 2116, 2118, 2120, 2122, 2124, 2126, 2128, 2130, 2132, 2134, 2136, 2138, 2140, 2142, 2144, 2146, 2148, 2150, 2152, 2154, 2156, 2158, 2160, 2162, 2164, 2166, 2168, 2170, 2172, 2174, 2176, 2178, 2180, 2182, 2184, 2186, 2188, 2190, 2192, 2194, 2196, 2198, 2200, 2202, 2204, 2206, 2208, 2210, 2212, 2214, 2216, 2218, 2220, 2222, 2224, 2226, 2228, 2230, 2232, 2234, 2236, 2238, 2240, 2242, 2244, 2246, 2248, 2250, 2252, 2254, 2256, 2258, 2260, 2262, 2264, 2266, 2268, 2270, 2272, 2274, 2276, 2278, 2280, 2282, 2284, 2286, 2288, 2290, 2292, 2294, 2296, 2298, 2300, 2302, 2304, 2306, 2308, 2310, 2312, 2314, 2316, 2318, 2320, 2322, 2324, 2326, 2328, 2330, 2332, 2334, 2336, 2338, 2340, 2342, 2344, 2346, 2348, 2350, 2352, 2354, 2356, 2358, 2360, 2362, 2364, 2366, 2368, 2370, 2372, 2374, 2376, 2378, 2380, 2382, 2384, 2386, 2388, 2390, 2392, 2394, 2396, 2398, 2400, 2402, 2404, 2406, 2408, 2410, 2412, 2414, 2416, 2418, 2420, 2422, 2424, 2426, 2428, 2430, 2432, 2434, 2436, 2438, 2440, 2442, 2444, 2446, 2448, 2450, 2452, 2454, 2456, 2458, 2460, 2462, 2464, 2466, 2468, 2470, 2472, 2474, 2476, 2478, 2480, 2482, 2484, 2486, 2488, 2490, 2492, 2494, 2496, 2498, 2500, 2502, 2504, 2506, 2508, 2510, 2512, 2514, 2516, 2518, 2520, 2522, 2524, 2526, 2528, 2530, 2532, 2534, 2536, 2538, 2540, 2542, 2544, 2546, 2548, 2550, 2552, 2554, 2556, 2558, 2560, 2562, 2564, 2566, 2568, 2570, 2572, 2574, 2576, 2578, 2580, 2582, 2584, 2586, 2588, 2590, 2592, 2594, 2596, 2598, 2600, 2602, 2604, 2606, 2608, 2610, 2612, 2614, 2616, 2618, 2620, 2622, 2624, 2626, 2628, 2630, 2632, 2634, 2636, 2638, 2640, 2642, 2644, 2646, 2648, 2650, 2652, 2654, 2656, 2658, 2660, 2662, 2664, 2666, 2668, 2670, 2672, 2674, 2676, 2678, 2680, 2682, 2684, 2686, 2688, 2690, 2692, 2694, 2696, 2698, 2700, 2702, 2704, 2706, 2708, 2710, 2712, 2714, 2716, 2718, 2720, 2722, 2724, 2726, 2728, 2730, 2732, 2734, 2736, 2738, 2740, 2742, 2744, 2746, 2748, 2750, 2752, 2754, 2756, 2758, 2760, 2762, 2764, 2766, 2768, 2770, 2772, 2774, 2776, 2778, 2780, 2782, 2784, 2786, 2788, 2790, 2792, 2794, 2796, 2798, 2800, 2802, 2804, 2806, 2808, 2810, 2812, 2814, 2816, 2818, 2820, 2822, 2824, 2826, 2828, 2830, 2832, 2834, 2836, 2838, 2840, 2842, 2844, 2846, 2848, 2850, 2852, 2854, 2856, 2858, 2860, 2862, 2864, 2866, 2868, 2870, 2872, 2874, 2876, 2878, 2880, 2882, 2884, 2886, 2888, 2890, 2892, 2894, 2896, 2898, 2900, 2902, 2904, 2906, 2908, 2910, 2912, 2914, 2916, 2918, 2920, 2922, 2924, 2926, 2928, 2930, 2932, 2934, 2936, 2938, 2940, 2942, 2944, 2946, 2948, 2950, 2952, 2954, 2956, 2958, 2960, 2962, 2964, 2966, 2968, 2970, 2972, 2974, 2976, 2978, 2980, 2982, 2984, 2986, 2988, 2990, 2992, 2994, 2996, 2998, 3000, 3002, 3004, 3006, 3008, 3010, 3012, 3014, 3016, 3018, 3020, 3022, 3024, 3026, 3028, 3030, 3032, 3034, 3036, 3038, 3040, 3042, 3044, 3046, 3048, 3050, 3052, 3054, 3056, 3058, 3060, 3062, 3064, 3066, 3068, 3070, 3072, 3074, 3076, 3078, 3080, 3082, 3084, 3086, 3088, 3090, 3092, 3094, 3096, 3098, 3100, 3102, 3104, 3106, 3108, 3110, 3112, 3114, 3116, 3118, 3120, 3122, 3124, 3126, 3128, 3130, 3132, 3134, 3136, 3138, 3140, 3142, 3144, 3146, 3148, 3150, 3152, 3154, 3156, 3158, 3160, 3162, 3164, 3166, 3168, 3170, 3172, 3174, 3176, 3178, 3180, 3182, 3184, 3186, 3188, 3190, 3192, 3194, 3196, 3198, 3200, 3202, 3204, 3206, 3208, 3210, 3212, 3214, 3216, 3218, 3220, 3222, 3224, 3226, 3228, 3230, 3232, 3234, 3236, 3238, 3240, 3242, 3244, 3246, 3248, 3250, 3252, 3254, 3256, 3258, 3260, 3262, 3264, 3266, 3268, 3270, 3272, 3274, 3276, 3278, 3280, 3282, 3284, 3286, 3288, 3290, 3292, 3294, 3296, 3298, 3300, 3302, 3304, 3306, 3308, 3310, 3312, 3314, 3316, 3318, 3320, 3322, 3324, 3326, 3328, 3330, 3332, 3334, 3336, 3338, 3340, 3342, 3344, 3346, 3348, 3350, 3352, 3354, 3356, 3358, 3360, 3362, 3364, 3366, 3368, 3370, 3372, 3374, 3376, 3378, 3380, 3382, 3384, 3386, 3388, 3390, 3392, 3394, 3396, 3398, 3400, 3402, 3404, 3406, 3408, 3410, 3412, 3414, 3416, 3418, 3420, 3422, 3424, 3426, 3428, 3430, 3432, 3434, 3436, 3438, 3440, 3442, 3444, 3446, 3448, 3450, 3452, 3454, 3456, 3458, 3460, 3462, 3464, 3466, 3468, 3470, 3472, 3474, 3476, 3478, 3480, 3482, 3484, 3486, 3488, 3490, 3492, 3494, 3496, 3498, 3500, 3502, 3504, 3506, 3508, 3510, 3512, 3514, 3516, 3518, 3520, 3522, 3524, 3526, 3528, 3530, 3532, 3534, 3536, 3538, 3540, 3542, 3544, 3546, 3548, 3550, 3552, 3554, 3556, 3558, 3560, 3562, 3564, 3566, 3568, 3570, 3572, 3574, 3576, 3578, 3580, 3582, 3584, 3586, 3588, 3590, 3592, 3594, 3596, 3598, 3600, 3602, 3604, 3606, 3608, 3610, 3612, 3614, 3616, 3618, 3620, 3622, 3624, 3626, 3628, 3630, 3632, 3634, 3636, 3638, 3640, 3642, 3644, 3646, 3648, 3650, 3652, 3654, 3656, 3658, 3660, 3662, 3664, 3666, 3668, 3670, 3672, 3674, 3676, 3678, 3680, 3682, 3684, 3686, 3688, 3690, 3692, 3694, 3696, 3698, 3700, 3702, 3704, 3706.

4. The polypeptide of claim 3, wherein the fragment comprises a T-cell or a B-cell epitope from the SEQ ID NO: amino acid sequence.

5. Antibody that binds to the polypeptide of any preceding claim.

6. A monoclonal antibody of claim 5.

7. Nucleic acid comprising an nucleotide sequence that has at least 75% sequence identity to one or more of SEQ ID NOS: 1, 3, 5, 7, 9, 11, 13, 15, 17, 19, 21, 23, 25, 27, 29, 31, 33, 35, 37, 39, 41, 43, 45, 47, 49, 51, 53, 55, 57, 59, 61, 63, 65, 67, 69, 71, 73, 75, 77, 79, 81, 83, 85, 87, 89, 91, 93, 95, 97, 99, 101, 103, 105, 107, 109, 111, 113, 115, 117, 119, 121, 123, 125, 127, 129, 131, 133, 135, 137, 139, 141, 143, 145, 147, 149, 151, 153, 155, 157, 159, 161, 163, 165, 167, 169, 171, 173, 175, 177, 179, 181, 183, 185, 187, 189, 191, 193, 195, 197, 199, 201, 203, 205, 207, 209, 211, 213, 215, 217, 219, 221, 223, 225, 227, 229, 231, 233, 235, 237, 239, 241, 243, 245, 247, 249, 251, 253, 255, 257, 259, 261, 263, 265, 267, 269, 271, 273, 275, 277, 279, 281, 283, 285, 287, 289, 291, 293, 295, 297, 299, 301, 303, 305, 307, 309, 311, 313, 315, 317, 319, 321, 323, 325, 327, 329, 331, 333, 335, 337, 339, 341, 343, 345, 347, 349, 351, 353, 355, 357, 359, 361, 363, 365, 367, 369, 371, 373, 375, 377, 379, 381, 383, 385, 387, 389, 391, 393, 395, 397, 399, 401, 403, 405, 407, 409, 411, 413, 415, 417, 419, 421, 423, 425, 427, 429, 431, 433, 435, 437, 439, 441, 443, 445, 447, 449, 451, 453, 455, 457, 459, 461, 463, 465, 467, 469, 471, 473, 475, 477, 479, 481, 483, 485, 487, 489, 491, 493, 495, 497, 499, 501, 503, 505, 507, 509, 511, 513, 515, 517, 519, 521, 523, 525, 527, 529, 531, 533, 535, 537, 539, 541, 543, 545, 547, 549, 551, 553, 555, 557, 559, 561, 563, 565, 567, 569, 571, 573, 575, 577, 579, 581, 583, 585, 587, 589, 591, 593, 595, 597, 599, 601, 603, 605, 607, 609, 611, 613, 615, 617, 619, 621, 623, 625, 627, 629, 631, 633, 635, 637, 639, 641, 643, 645, 647, 649, 651, 653, 655, 657, 659, 661, 663, 665, 667, 669, 671, 673, 675, 677, 679, 681, 683, 685, 687, 689, 691, 693, 695, 697, 699, 701, 703, 705, 707, 709, 711, 713, 715, 717, 719, 721, 723, 725, 727, 729, 731, 733, 735, 737, 739, 741, 743, 745, 747, 749, 751, 753, 755, 757, 759, 761, 763, 765, 767, 769, 771, 773, 775, 777, 779, 781, 783, 785, 787, 789, 791, 793, 795, 797, 799, 801, 803, 805, 807, 809, 811, 813, 815, 817, 819, 821, 823, 825, 827, 829, 831, 833, 835, 837, 839, 841, 843, 845, 847, 849, 851, 853, 855, 857, 859, 861, 863, 865, 867, 869, 871, 873, 875, 877, 879, 881, 883, 885, 887, 889, 891, 893, 895, 897, 899, 901, 903, 905, 907, 909, 911, 913, 915, 917, 919, 921, 923, 925, 927, 929, 931, 933, 935, 937, 939, 941, 943, 945, 947, 949, 951, 953, 955, 957, 959, 961, 963, 965, 967, 969, 971, 973, 975, 977, 979, 981, 983, 985, 987, 989, 991, 993, 995, 997, 999, 1001, 1003, 1005, 1007, 1009, 1011, 1013, 1015, 1017, 1019, 1021, 1023, 1025, 1027, 1029, 1031, 1033, 1035, 1037, 1039, 1041, 1043, 1045, 1047, 1049, 1051, 1053, 1055, 1057, 1059, 1061, 1063, 1065, 1067, 1069, 1071, 1073, 1075, 1077, 1079, 1081, 1083, 1085, 1087, 1089, 1091, 1093, 1095, 1097, 1099, 1101, 1103, 1105, 1107, 1109, 1111, 1113, 1115, 1117, 1119, 1121, 1123, 1125, 1127, 1129, 1131, 1133, 1135, 1137, 1139, 1141, 1143, 1145, 1147, 1149, 1151, 1153, 1155, 1157, 1159, 1161, 1163, 1165, 1167, 1169, 1171, 1173, 1175, 1177, 1179, 1181, 1183, 1185, 1187, 1189, 1191, 1193, 1195, 1197, 1199, 1201, 1203, 1205, 1207, 1209, 1211, 1213, 1215, 1217, 1219, 1221, 1223, 1225, 1227, 1229, 1231, 1233, 1235, 1237, 1239, 1241, 1243, 1245, 1247, 1249, 1251, 1253, 1255, 1257, 1259, 1261, 1263, 1265, 1267, 1269, 1271, 1273, 1275, 1277, 1279, 1281, 1283, 1285, 1287, 1289, 1291, 1293, 1295, 1297, 1299, 1301, 1303, 1305, 1307, 1309, 1311, 1313, 1315, 1317, 1319, 1321, 1323, 1325, 1327, 1329, 1331, 1333, 1335, 1337, 1339, 1341, 1343, 1345, 1347, 1349, 1351, 1353, 1355, 1357, 1359, 1361, 1363, 1365, 1367, 1369, 1371, 1373, 1375, 1377, 1379, 1381, 1383, 1385, 1387, 1389, 1391, 1393, 1395, 1397, 1399, 1401, 1403, 1405, 1407, 1409, 1411, 1413, 1415, 1417, 1419, 1421, 1423, 1425, 1427, 1429, 1431, 1433, 1435, 1437, 1439, 1441, 1443, 1445, 1447, 1449, 1451, 1453, 1455, 1457, 1459, 1461, 1463, 1465, 1467, 1469, 1471, 1473, 1475, 1477, 1479, 1481, 1483, 1485, 1487, 1489, 1491, 1493, 1495, 1497, 1499, 1501, 1503, 1505, 1507, 1509, 1511, 1513, 1515, 1517, 1519, 1521, 1523, 1525, 1527, 1529, 1531, 1533, 1535, 1537, 1539, 1541, 1543, 1545, 1547, 1549, 1551, 1553, 1555, 1557, 1559, 1561, 1563, 1565, 1567, 1569, 1571, 1573, 1575, 1577, 1579, 1581, 1583, 1585, 1587, 1589, 1591, 1593, 1595, 1597, 1599, 1601, 1603, 1605, 1607, 1609, 1611, 1613, 1615, 1617, 1619, 1621, 1623, 1625, 1627, 1629, 1631, 1633, 1635, 1637, 1639, 1641, 1643, 1645, 1647, 1649, 1651, 1653, 1655, 1657, 1659, 1661, 1663, 1665, 1667, 1669, 1671, 1673, 1675, 1677, 1679, 1681, 1683, 1685, 1687, 1689, 1691, 1693, 1695, 1697, 1699, 1701, 1703, 1705, 1707, 1709, 1711, 1713, 1715, 1717, 1719, 1721, 1723, 1725, 1727, 1729, 1731, 1733, 1735, 1737, 1739, 1741, 1743, 1745, 1747, 1749, 1751, 1753, 1755, 1757, 1759, 1761, 1763, 1765, 1767, 1769, 1771, 1773, 1775, 1777, 1779, 1781, 1783, 1785, 1787, 1789, 1791, 1793, 1795, 1797, 1799, 1801, 1803, 1805, 1807, 1809, 1811, 1813, 1815, 1817, 1819, 1821, 1823, 1825, 1827, 1829, 1831, 1833, 1835, 1837, 1839, 1841, 1843, 1845, 1847, 1849, 1851, 1853, 1855, 1857, 1859, 1861, 1863, 1865, 1867, 1869, 1871, 1873, 1875, 1877, 1879, 1881, 1883, 1885, 1887, 1889, 1891, 1893, 1895, 1897, 1899, 1901, 1903, 1905, 1907, 1909, 1911, 1913, 1915, 1917, 1919, 1921, 1923, 1925, 1927, 1929, 1931, 1933, 1935, 1937, 1939, 1941, 1943, 1945, 1947, 1949, 1951, 1953, 1955, 1957, 1959, 1961, 1963, 1965, 1967, 1969, 1971, 1973, 1975, 1977, 1979, 1981, 1983, 1985, 1987, 1989, 1991, 1993, 1995, 1997, 1999, 2001, 2003, 2005, 2007, 2009, 2011, 2013, 2015, 2017, 2019, 2021, 2023, 2025, 2027, 2029, 2031, 2033, 2035, 2037, 2039, 2041, 2043, 2045, 2047, 2049, 2051, 2053, 2055, 2057, 2059, 2061, 2063, 2065, 2067, 2069, 2071, 2073, 2075, 2077, 2079, 2081, 2083, 2085, 2087, 2089, 2091, 2093, 2095, 2097, 2099, 2101, 2103, 2105, 2107, 2109, 2111, 2113, 2115, 2117, 2119, 2121, 2123, 2125, 2127, 2129, 2131, 2133, 2135, 2137, 2139, 2141, 2143, 2145, 2147, 2149, 2151, 2153, 2155, 2157, 2159, 2161, 2163, 2165, 2167, 2169, 2171, 2173, 2175, 2177, 2179, 2181, 2183, 2185, 2187, 2189, 2191, 2193, 2195, 2197, 2199, 2201, 2203, 2205, 2207, 2209, 2211, 2213, 2215, 2217, 2219, 2221, 2223, 2225, 2227, 2229, 2231, 2233, 2235, 2237, 2239, 2241, 2243, 2245, 2247, 2249, 2251, 2253, 2255, 2257, 2259, 2261, 2263, 2265, 2267, 2269, 2271, 2273, 2275, 2277, 2279, 2281, 2283, 2285, 2287, 2289, 2291, 2293, 2295, 2297, 2299, 2301, 2303, 2305, 2307, 2309, 2311, 2313, 2315, 2317, 2319, 2321, 2323, 2325, 2327, 2329, 2331, 2333, 2335, 2337, 2339, 2341, 2343, 2345, 2347, 2349, 2351, 2353, 2355, 2357, 2359, 2361, 2363, 2365, 2367, 2369, 2371, 2373, 2375, 2377, 2379, 2381, 2383, 2385, 2387, 2389, 2391, 2393, 2395, 2397, 2399, 2401, 2403, 2405, 2407, 2409, 2411, 2413, 2415, 2417, 2419, 2421, 2423, 2425, 2427, 2429, 2431, 2433, 2435, 2437, 2439, 2441, 2443, 2445, 2447, 2449, 2451, 2453, 2455, 2457, 2459, 2461, 2463, 2465, 2467, 2469, 2471, 2473, 2475, 2477, 2479, 2481, 2483, 2485, 2487, 2489, 2491, 2493, 2495, 2497, 2499, 2501, 2503, 2505, 2507, 2509, 2511, 2513, 2515, 2517, 2519, 2521, 2523, 2525, 2527, 2529, 2531, 2533, 2535, 2537, 2539, 2541, 2543, 2545, 2547, 2549, 2551, 2553, 2555, 2557, 2559, 2561, 2563, 2565, 2567, 2569, 2571, 2573, 2575, 2577, 2579, 2581, 2583, 2585, 2587, 2589, 2591, 2593, 2595, 2597, 2599, 2601, 2603, 2605, 2607, 2609, 2611, 2613, 2615, 2617, 2619, 2621, 2623, 2625, 2627, 2629, 2631, 2633, 2635, 2637, 2639, 2641, 2643, 2645, 2647, 2649, 2651, 2653, 2655, 2657, 2659, 2661, 2663, 2665, 2667, 2669, 2671, 2673, 2675, 2677, 2679, 2681, 2683, 2685, 2687, 2689, 2691, 2693, 2695, 2697, 2699, 2701, 2703, 2705, 2707, 2709, 2711, 2713, 2715, 2717, 2719, 2721, 2723, 2725, 2727, 2729, 2731, 2733, 2735, 2737, 2739, 2741, 2743, 2745, 2747, 2749, 2751, 2753, 2755, 2757, 2759, 2761, 2763, 2765, 2767, 2769, 2771, 2773, 2775, 2777, 2779, 2781, 2783, 2785, 2787, 2789, 2791, 2793, 2795, 2797, 2799, 2801, 2803, 2805, 2807, 2809, 2811, 2813, 2815, 2817, 2819, 2821, 2823, 2825, 2827, 2829, 2831, 2833, 2835, 2837, 2839, 2841, 2843, 2845, 2847, 2849, 2851, 2853, 2855, 2857, 2859, 2861, 2863, 2865, 2867, 2869, 2871, 2873, 2875, 2877, 2879, 2881, 2883, 2885, 2887, 2889, 2891, 2893, 2895, 2897, 2899, 2901, 2903, 2905, 2907, 2909, 2911, 2913, 2915, 2917, 2919, 2921, 2923, 2925, 2927, 2929, 2931, 2933, 2935, 2937, 2939, 2941, 2943, 2945, 2947, 2949, 2951, 2953, 2955, 2957, 2959, 2961, 2963, 2965, 2967, 2969, 2971, 2973, 2975, 2977, 2979, 2981, 2983, 2985, 2987, 2989, 2991, 2993, 2995, 2997, 2999, 3001, 3003, 3005, 3007, 3009, 3011, 3013, 3015, 3017, 3019, 3021, 3023, 3025, 3027, 3029, 3031, 3033, 3035, 3037, 3039, 3041, 3043, 3045, 3047, 3049, 3051, 3053, 3055, 3057, 3059, 3061, 3063, 3065, 3067, 3069, 3071, 3073, 3075, 3077, 3079, 3081, 3083, 3085, 3087, 3089, 3091, 3093, 3095, 3097, 3099, 3101, 3103, 3105, 3107, 3109, 3111, 3113, 3115, 3117, 3119, 3121, 3123, 3125, 3127, 3129, 3131, 3133, 3135, 3137, 3139, 3141, 3143, 3145, 3147, 3149, 3151, 3153, 3155, 3157, 3159, 3161, 3163, 3165, 3167, 3169, 3171, 3173, 3175, 3177, 3179, 3181, 3183, 3185, 3187, 3189, 3191, 3193, 3195, 3197, 3199, 3201, 3203, 3205, 3207, 3209, 3211, 3213, 3215, 3217, 3219, 3221, 3223, 3225, 3227, 3229, 3231, 3233, 3235, 3237, 3239, 3241, 3243, 3245, 3247, 3249, 3251, 3253, 3255, 3257, 3259, 3261, 3263, 3265, 3267, 3269, 3271, 3273, 3275, 3277, 3279, 3281, 3283, 3285, 3287, 3289, 3291, 3293, 3295, 3297, 3299, 3301, 3303, 3305, 3307, 3309, 3311, 3313, 3315, 3317, 3319, 3321, 3323, 3325, 3327, 3329, 3331, 3333, 3335, 3337, 3339, 3341, 3343, 3345, 3347, 3349, 3351, 3353, 3355, 3357, 3359, 3361, 3363, 3365, 3367, 3369, 3371, 3373, 3375, 3377, 3379, 3381, 3383, 3385, 3387, 3389, 3391, 3393, 3395, 3397, 3399, 3401, 3403, 3405, 3407, 3409, 3411, 3413, 3415, 3417, 3419, 3421, 3423, 3425, 3427, 3429, 3431, 3433, 3435, 3437, 3439, 3441, 3443, 3445, 3447, 3449, 3451, 3453, 3455, 3457, 3459, 3461, 3463, 3465, 3467, 3469, 3471, 3473, 3475, 3477, 3479, 3481, 3483, 3485, 3487, 3489, 3491, 3493, 3495, 3497, 3499, 3501, 3503, 3505, 3507, 3509, 3511, 3513, 3515, 3517, 3519, 3521, 3523, 3525, 3527, 3529, 3531, 3533, 3535, 3537, 3539, 3541, 3543, 3545, 3547, 3549, 3551, 3553, 3555, 3557, 3559, 3561, 3563, 3565, 3567, 3569, 3571, 3573, 3575, 3577, 3579, 3581, 3583, 3585, 3587, 3589, 3591, 3593, 3595, 3597, 3599, 3601, 3603, 3605, 3607, 3609, 3611, 3613, 3615, 3617, 3619, 3621, 3623, 3625, 3627, 3629, 3631, 3633, 3635, 3637, 3639, 3641, 3643, 3645, 3647, 3649, 3651, 3653, 3655, 3657, 3659, 3661, 3663, 3665, 3667, 3669, 3671, 3673, 3675, 3677, 3679, 3681, 3683, 3685, 3687, 3689, 3691, 3693, 3695, 3697, 3699, 3701, 3703, 3705.

8. Nucleic acid of claim 7, comprising an nucleotide sequence selected from SEQ ID NOS: 1, 3, 5, 7, 9, 11, 13, 15, 17, 19, 21, 23, 25, 27, 29, 31, 33, 35, 37, 39, 41, 43, 45, 47, 49, 51, 53, 55, 57, 59, 61, 63, 65, 67, 69, 71, 73, 75, 77, 79, 81, 83, 85, 87, 89, 91, 93, 95, 97, 99, 101, 103, 105, 107, 109, 111, 113, 115, 117, 119, 121, 123, 125, 127, 129, 131, 133, 135, 137, 139, 141, 143, 145, 147, 149, 151, 153, 155, 157, 159, 161, 163, 165, 167, 169, 171, 173, 175, 177, 179, 181, 183, 185, 187, 189, 191, 193, 195, 197, 199, 201, 203, 205, 207, 209, 211, 213, 215, 217, 219, 221, 223, 225, 227, 229, 231, 233, 235, 237, 239, 241, 243, 245, 247, 249, 251, 253, 255, 257, 259, 261, 263, 265, 267, 269, 271, 273, 275, 277, 279, 281, 283, 285, 287, 289, 291, 293, 295, 297, 299, 301, 303, 305, 307, 309, 311, 313, 315, 317, 319, 321, 323, 325, 327, 329, 331, 333, 335, 337, 339, 341, 343, 345, 347, 349, 351, 353, 355, 357, 359, 361, 363, 365, 367, 369, 371, 373, 375, 377, 379, 381, 383, 385, 387, 389, 391, 393, 395, 397, 399, 401, 403, 405, 407, 409, 411, 413, 415, 417, 419, 421, 423, 425, 427, 429, 431, 433, 435, 437, 439, 441, 443, 445, 447, 449, 451, 453, 455, 457, 459, 461, 463, 465, 467, 469, 471, 473, 475, 477, 479, 481, 483, 485, 487, 489, 491, 493, 495, 497, 499, 501, 503, 505, 507, 509, 511, 513, 515, 517, 519, 521, 523, 525, 527, 529, 531, 533, 535, 537, 539, 541, 543, 545, 547, 549, 551, 553, 555, 557, 559, 561, 563, 565, 567, 569, 571, 573, 575, 577, 579, 581, 583, 585, 587, 589, 591, 593, 595, 597, 599, 601, 603, 605, 607, 609, 611, 613, 615, 617, 619, 621, 623, 625, 627, 629, 631, 633, 635, 637, 639, 641, 643, 645, 647, 649, 651, 653, 655, 657, 659, 661, 663, 665, 667, 669, 671, 673, 675, 677, 679, 681, 683, 685, 687, 689, 691, 693, 695, 697, 699, 701, 703, 705, 707, 709, 711, 713, 715, 717, 719, 721, 723, 725, 727, 729, 731, 733, 735, 737, 739, 741, 743, 745, 747, 749, 751, 753, 755, 757, 759, 761, 763, 765, 767, 769, 771, 773, 775, 777, 779, 781, 783, 785, 787, 789, 791, 793, 795, 797, 799, 801, 803, 805, 807, 809, 811, 813, 815, 817, 819, 821, 823, 825, 827, 829, 831, 833, 835, 837, 839, 841, 843, 845, 847, 849, 851, 853, 855, 857, 859, 861, 863, 865, 867, 869, 871, 873, 875, 877, 879, 881, 883, 885, 887, 889, 891, 893, 895, 897, 899, 901, 903, 905, 907, 909, 911, 913, 915, 917, 919, 921, 923, 925, 927, 929, 931, 933, 935, 937, 939, 941, 943, 945, 947, 949, 951, 953, 955, 957, 959, 961, 963, 965, 967, 969, 971, 973, 975, 977, 979, 981, 983, 985, 987, 989, 991, 993, 995, 997, 999, 1001, 1003, 1005, 1007, 1009, 1011, 1013, 1015, 1017, 1019, 1021, 1023, 1025, 1027, 1029, 1031, 1033, 1035, 1037, 1039, 1041, 1043, 1045, 1047, 1049, 1051, 1053, 1055, 1057, 1059, 1061, 1063, 1065, 1067, 1069, 1071, 1073, 1075, 1077, 1079, 1081, 1083, 1085, 1087, 1089, 1091, 1093, 1095, 1097, 1099, 1101, 1103, 1105, 1107, 1109, 1111, 1113, 1115, 1117, 1119, 1121, 1123, 1125, 1127, 1129, 1131, 1133, 1135, 1137, 1139, 1141, 1143, 1145, 1147, 1149, 1151, 1153, 1155, 1157, 1159, 1161, 1163, 1165, 1167, 1169, 1171, 1173, 1175, 1177, 1179, 1181, 1183, 1185, 1187, 1189, 1191, 1193, 1195, 1197, 1199, 1201, 1203, 1205, 1207, 1209, 1211, 1213, 1215, 1217, 1219, 1221, 1223, 1225, 1227, 1229, 1231, 1233, 1235, 1237, 1239, 1241, 1243, 1245, 1247, 1249, 1251, 1253, 1255, 1257, 1259, 1261, 1263, 1265, 1267, 1269, 1271, 1273, 1275, 1277, 1279, 1281, 1283, 1285, 1287, 1289, 1291, 1293, 1295, 1297, 1299, 1301, 1303, 1305, 1307, 1309, 1311, 1313, 1315, 1317, 1319, 1321, 1323, 1325, 1327, 1329, 1331, 1333, 1335, 1337, 1339, 1341, 1343, 1345, 1347, 1349, 1351, 1353, 1355, 1357, 1359, 1361, 1363, 1365, 1367, 1369, 1371, 1373, 1375, 1377, 1379, 1381, 1383, 1385, 1387, 1389, 1391, 1393, 1395, 1397, 1399, 1401, 1403, 1405, 1407, 1409, 1411, 1413, 1415, 1417, 1419, 1421, 1423, 1425, 1427, 1429, 1431, 1433, 1435, 1437, 1439, 1441, 1443, 1445, 1447, 1449, 1451, 1453, 1455, 1457, 1459, 1461, 1463, 1465, 1467, 1469, 1471, 1473, 1475, 1477, 1479, 1481, 1483, 1485, 1487, 1489, 1491, 1493, 1495, 1497, 1499, 1501, 1503, 1505, 1507, 1509, 1511, 1513, 1515, 1517, 1519, 1521, 1523, 1525, 1527, 1529, 1531, 1533, 1535, 1537, 1539, 1541, 1543, 1545, 1547, 1549, 1551, 1553, 1555, 1557, 1559, 1561, 1563, 1565, 1567, 1569, 1571, 1573, 1575, 1577, 1579, 1581, 1583, 1585, 1587, 1589, 1591, 1593, 1595, 1597, 1599, 1601, 1603, 1605, 1607, 1609, 1611, 1613, 1615, 1617, 1619, 1621, 1623, 1625, 1627, 1629, 1631, 1633, 1635, 1637, 1639, 1641, 1643, 1645, 1647, 1649, 1651, 1653, 1655, 1657, 1659, 1661, 1663, 1665, 1667, 1669, 1671, 1673, 1675, 1677, 1679, 1681, 1683, 1685, 1687, 1689, 1691, 1693, 1695, 1697, 1699, 1701, 1703, 1705, 1707, 1709, 1711, 1713, 1715, 1717, 1719, 1721, 1723, 1725, 1727, 1729, 1731, 1733, 1735, 1737, 1739, 1741, 1743, 1745, 1747, 1749, 1751, 1753, 1755, 1757, 1759, 1761, 1763, 1765, 1767, 1769, 1771, 1773, 1775, 1777, 1779, 1781, 1783, 1785, 1787, 1789, 1791, 1793, 1795, 1797, 1799, 1801, 1803, 1805, 1807, 1809, 1811, 1813, 1815, 1817, 1819, 1821, 1823, 1825, 1827, 1829, 1831, 1833, 1835, 1837, 1839, 1841, 1843, 1845, 1847, 1849, 1851, 1853, 1855, 1857, 1859, 1861, 1863, 1865, 1867, 1869, 1871, 1873, 1875, 1877, 1879, 1881, 1883, 1885, 1887, 1889, 1891, 1893, 1895, 1897, 1899, 1901, 1903, 1905, 1907, 1909, 1911, 1913, 1915, 1917, 1919, 1921, 1923, 1925, 1927, 1929, 1931, 1933, 1935, 1937, 1939, 1941, 1943, 1945, 1947, 1949, 1951, 1953, 1955, 1957, 1959, 1961, 1963, 1965, 1967, 1969, 1971, 1973, 1975, 1977, 1979, 1981, 1983, 1985, 1987, 1989, 1991, 1993, 1995, 1997, 1999, 2001, 2003, 2005, 2007, 2009, 2011, 2013, 2015, 2017, 2019, 2021, 2023, 2025, 2027, 2029, 2031, 2033, 2035, 2037, 2039, 2041, 2043, 2045, 2047, 2049, 2051, 2053, 2055, 2057, 2059, 2061, 2063, 2065, 2067, 2069, 2071, 2073, 2075, 2077, 2079, 2081, 2083, 2085, 2087, 2089, 2091, 2093, 2095, 2097, 2099, 2101, 2103, 2105, 2107, 2109, 2111, 2113, 2115, 2117, 2119, 2121, 2123, 2125, 2127, 2129, 2131, 2133, 2135, 2137, 2139, 2141, 2143, 2145, 2147, 2149, 2151, 2153, 2155, 2157, 2159, 2161, 2163, 2165, 2167, 2169, 2171, 2173, 2175, 2177, 2179, 2181, 2183, 2185, 2187, 2189, 2191, 2193, 2195, 2197, 2199, 2201, 2203, 2205, 2207, 2209, 2211, 2213, 2215, 2217, 2219, 2221, 2223, 2225, 2227, 2229, 2231, 2233, 2235, 2237, 2239, 2241, 2243, 2245, 2247, 2249, 2251, 2253, 2255, 2257, 2259, 2261, 2263, 2265, 2267, 2269, 2271, 2273, 2275, 2277, 2279, 2281, 2283, 2285, 2287, 2289, 2291, 2293, 2295, 2297, 2299, 2301, 2303, 2305, 2307, 2309, 2311, 2313, 2315, 2317, 2319, 2321, 2323, 2325, 2327, 2329, 2331, 2333, 2335, 2337, 2339, 2341, 2343, 2345, 2347, 2349, 2351, 2353, 2355, 2357, 2359, 2361, 2363, 2365, 2367, 2369, 2371, 2373, 2375, 2377, 2379, 2381, 2383, 2385, 2387, 2389, 2391, 2393, 2395, 2397, 2399, 2401, 2403, 2405, 2407, 2409, 2411, 2413, 2415, 2417, 2419, 2421, 2423, 2425, 2427, 2429, 2431, 2433, 2435, 2437, 2439, 2441, 2443, 2445, 2447, 2449, 2451, 2453, 2455, 2457, 2459, 2461, 2463, 2465, 2467, 2469, 2471, 2473, 2475, 2477, 2479, 2481, 2483, 2485, 2487, 2489, 2491, 2493, 2495, 2497, 2499, 2501, 2503, 2505, 2507, 2509, 2511, 2513, 2515, 2517, 2519, 2521, 2523, 2525, 2527, 2529, 2531, 2533, 2535, 2537, 2539, 2541, 2543, 2545, 2547, 2549, 2551, 2553, 2555, 2557, 2559, 2561, 2563, 2565, 2567, 2569, 2571, 2573, 2575, 2577, 2579, 2581, 2583, 2585, 2587, 2589, 2591, 2593, 2595, 2597, 2599, 2601, 2603, 2605, 2607, 2609, 2611, 2613, 2615, 2617, 2619, 2621, 2623, 2625, 2627, 2629, 2631, 2633, 2635, 2637, 2639, 2641, 2643, 2645, 2647, 2649, 2651, 2653, 2655, 2657, 2659, 2661, 2663, 2665, 2667, 2669, 2671, 2673, 2675, 2677, 2679, 2681, 2683, 2685, 2687, 2689, 2691, 2693, 2695, 2697, 2699, 2701, 2703, 2705, 2707, 2709, 2711, 2713, 2715, 2717, 2719, 2721, 2723, 2725, 2727, 2729, 2731, 2733, 2735, 2737, 2739, 2741, 2743, 2745, 2747, 2749, 2751, 2753, 2755, 2757, 2759, 2761, 2763, 2765, 2767, 2769, 2771, 2773, 2775, 2777, 2779, 2781, 2783, 2785, 2787, 2789, 2791, 2793, 2795, 2797, 2799, 2801, 2803, 2805, 2807, 2809, 2811, 2813, 2815, 2817, 2819, 2821, 2823, 2825, 2827, 2829, 2831, 2833, 2835, 2837, 2839, 2841, 2843, 2845, 2847, 2849, 2851, 2853, 2855, 2857, 2859, 2861, 2863, 2865, 2867, 2869, 2871, 2873, 2875, 2877, 2879, 2881, 2883, 2885, 2887, 2889, 2891, 2893, 2895, 2897, 2899, 2901, 2903, 2905, 2907, 2909, 2911, 2913, 2915, 2917, 2919, 2921, 2923, 2925, 2927, 2929, 2931, 2933, 2935, 2937, 2939, 2941, 2943, 2945, 2947, 2949, 2951, 2953, 2955, 2957, 2959, 2961, 2963, 2965, 2967, 2969, 2971, 2973, 2975, 2977, 2979, 2981, 2983, 2985, 2987, 2989, 2991, 2993, 2995, 2997, 2999, 3001, 3003, 3005, 3007, 3009, 3011, 3013, 3015, 3017, 3019, 3021, 3023, 3025, 3027, 3029, 3031, 3033, 3035, 3037, 3039, 3041, 3043, 3045, 3047, 3049, 3051, 3053, 3055, 3057, 3059, 3061, 3063, 3065, 3067, 3069, 3071, 3073, 3075, 3077, 3079, 3081, 3083, 3085, 3087, 3089, 3091, 3093, 3095, 3097, 3099, 3101, 3103, 3105, 3107, 3109, 3111, 3113, 3115, 3117, 3119, 3121, 3123, 3125, 3127, 3129, 3131, 3133, 3135, 3137, 3139, 3141, 3143, 3145, 3147, 3149, 3151, 3153, 3155, 3157, 3159, 3161, 3163, 3165, 3167, 3169, 3171, 3173, 3175, 3177, 3179, 3181, 3183, 3185, 3187, 3189, 3191, 3193, 3195, 3197, 3199, 3201, 3203, 3205, 3207, 3209, 3211, 3213, 3215, 3217, 3219, 3221, 3223, 3225, 3227, 3229, 3231, 3233, 3235, 3237, 3239, 3241, 3243, 3245, 3247, 3249, 3251, 3253, 3255, 3257, 3259, 3261, 3263, 3265, 3267, 3269, 3271, 3273, 3275, 3277, 3279, 3281, 3283, 3285, 3287, 3289, 3291, 3293, 3295, 3297, 3299, 3301, 3303, 3305, 3307, 3309, 3311, 3313, 3315, 3317, 3319, 3321, 3323, 3325, 3327, 3329, 3331, 3333, 3335, 3337, 3339, 3341, 3343, 3345, 3347, 3349, 3351, 3353, 3355, 3357, 3359, 3361, 3363, 3365, 3367, 3369, 3371, 3373, 3375, 3377, 3379, 3381, 3383, 3385, 3387, 3389, 3391, 3393, 3395, 3397, 3399, 3401, 3403, 3405, 3407, 3409, 3411, 3413, 3415, 3417, 3419, 3421, 3423, 3425, 3427, 3429, 3431, 3433, 3435, 3437, 3439, 3441, 3443, 3445, 3447, 3449, 3451, 3453, 3455, 3457, 3459, 3461, 3463, 3465, 3467, 3469, 3471, 3473, 3475, 3477, 3479, 3481, 3483, 3485, 3487, 3489, 3491, 3493, 3495, 3497, 3499, 3501, 3503, 3505, 3507, 3509, 3511, 3513, 3515, 3517, 3519, 3521, 3523, 3525, 3527, 3529, 3531, 3533, 3535, 3537, 3539, 3541, 3543, 3545, 3547, 3549, 3551, 3553, 3555, 3557, 3559, 3561, 3563, 3565, 3567, 3569, 3571, 3573, 3575, 3577, 3579, 3581, 3583, 3585, 3587, 3589, 3591, 3593, 3595, 3597, 3599, 3601, 3603, 3605, 3607, 3609, 3611, 3613, 3615, 3617, 3619, 3621, 3623, 3625, 3627, 3629, 3631, 3633, 3635, 3637, 3639, 3641, 3643, 3645, 3647, 3649, 3651, 3653, 3655, 3657, 3659, 3661, 3663, 3665, 3667, 3669, 3671, 3673, 3675, 3677, 3679, 3681, 3683, 3685, 3687, 3689, 3691, 3693, 3695, 3697, 3699, 3701, 3703, 3705.

9. Nucleic acid that can hybridize to the nucleic acid of claim 8 under high stringency conditions.

10. Nucleic acid comprising a fragments of 10 or more consecutive nucleotides from one or more of SEQ ID NOS: 1, 3, 5, 7, 9, 11, 13, 15, 17, 19, 21, 23, 25, 27, 29, 31, 33, 35, 37, 39, 41, 43, 45, 47, 49, 51, 53, 55, 57, 59,61, 63, 65, 67, 69, 71, 73, 75, 77, 79, 81, 83, 85, 87, 89, 91, 93, 95, 97, 99, 101, 103, 105, 107, 109, 111, 113, 115, 117, 119, 121, 123, 125, 127, 129, 131, 133, 135, 137, 139, 141, 143, 145, 147, 149, 151, 153, 155, 157, 159, 161, 163, 165, 167, 169, 171, 173, 175, 177, 179, 181, 183, 185, 187, 189, 191, 193, 195, 197, 199, 201, 203, 205, 207, 209, 211, 213, 215, 217, 219, 221, 223, 225, 227, 229, 231, 233, 235, 237, 239, 241, 243, 245, 247, 249, 251, 253, 255, 257, 259, 261, 263, 265, 267, 269, 271, 273, 275, 277, 279, 281, 283, 285, 287, 289, 291, 293, 295, 297, 299, 301, 303, 305, 307, 309, 311, 313, 315, 317, 319, 321, 323, 325, 327, 329, 331, 333, 335, 337, 339, 341, 343, 345, 347, 349, 351, 353, 355, 357, 359, 361, 363, 365, 367, 369, 371, 373, 375, 377, 379, 381, 383, 385, 387, 389, 391, 393, 395, 397, 399, 401, 403, 405, 407, 409, 411, 413, 415, 417, 419, 421, 423, 425, 427, 429, 431, 433, 435, 437, 439, 441, 443, 445, 447, 449, 451, 453, 455, 457, 459, 461, 463, 465, 467, 469, 471, 473, 475, 477, 479, 481, 483, 485, 487, 489, 491, 493, 495, 497, 499, 501, 503, 505, 507, 509, 511, 513, 515, 517, 519, 521, 523, 525, 527, 529, 531, 533, 535, 537, 539, 541, 543, 545, 547, 549, 551, 553, 555, 557, 559, 561, 563, 565, 567, 569, 571, 573, 575, 577, 579, 581, 583, 585, 587, 589, 591, 593, 595, 597, 599, 601, 603, 605, 607, 609, 611, 613, 615, 617, 619, 621, 623, 625, 627, 629, 631, 633, 635, 637, 639, 641, 643, 645, 647, 649, 651, 653, 655, 657, 659, 661, 663, 665, 667, 669, 671, 673, 675, 677, 679, 681, 683, 685, 687, 689, 691, 693, 695, 697, 699, 701, 703, 705, 707, 709, 711, 713, 715, 717, 719, 721, 723, 725, 727, 729, 731, 733, 735, 737, 739, 741, 743, 745, 747, 749, 751, 753, 755, 757, 759, 761, 763, 765, 767, 769, 771, 773, 775, 777, 779, 781, 783, 785, 787, 789, 791, 793, 795, 797, 799, 801, 803, 805, 807, 809, 811, 813, 815, 817, 819, 821, 823, 825, 827, 829, 831, 833, 835, 837, 839, 841, 843, 845, 847, 849, 851, 853, 855, 857, 859, 861, 863, 865, 867, 869, 871, 873, 875, 877, 879, 881, 883, 885, 887, 889, 891, 893, 895, 897, 899, 901, 903, 905, 907, 909, 911, 913, 915, 917, 919, 921, 923, 925, 927, 929, 931, 933, 935, 937, 939, 941, 943, 945, 947, 949, 951, 953, 955, 957, 959, 961, 963, 965, 967, 969, 971, 973, 975, 977, 979, 981, 983, 985, 987, 989, 991, 993, 995, 997, 999, 1001, 1003, 1005, 1007, 1009, 1011, 1013, 1015, 1017, 1019, 1021, 1023, 1025, 1027, 1029, 1031, 1033, 1035, 1037, 1039, 1041, 1043, 1045, 1047, 1049, 1051, 1053, 1055, 1057, 1059, 1061, 1063, 1065, 1067, 1069, 1071, 1073, 1075, 1077, 1079, 1081, 1083, 1085, 1087, 1089, 1091, 1093, 1095, 1097, 1099, 1101, 1103, 1105, 1107, 1109, 1111, 1113, 1115, 1117, 1119, 1121, 1123, 1125, 1127, 1129, 1131, 1133, 1135, 1137, 1139, 1141, 1143, 1145, 1147, 1149, 1151, 1153, 1155, 1157, 1159, 1161, 1163, 1165, 1167, 1169, 1171, 1173, 1175, 1177, 1179, 1181, 1183, 1185, 1187, 1189, 1191, 1193, 1195, 1197, 1199, 1201, 1203, 1205, 1207, 1209, 1211, 1213, 1215, 1217, 1219, 1221, 1223, 1225, 1227, 1229, 1231, 1233, 1235, 1237, 1239, 1241, 1243, 1245, 1247, 1249, 1251, 1253, 1255, 1257, 1259, 1261, 1263, 1265, 1267, 1269, 1271, 1273, 1275, 1277, 1279, 1281, 1283, 1285, 1287, 1289, 1291, 1293, 1295, 1297, 1299, 1301, 1303, 1305, 1307, 1309, 1311, 1313, 1315, 1317, 1319, 1321, 1323, 1325, 1327, 1329, 1331, 1333, 1335, 1337, 1339, 1341, 1343, 1345, 1347, 1349, 1351, 1353, 1355, 1357, 1359, 1361, 1363, 1365, 1367, 1369, 1371, 1373, 1375, 1377, 1379, 1381, 1383, 1385, 1387, 1389, 1391, 1393, 1395, 1397, 1399, 1401, 1403, 1405, 1407, 1409, 1411, 1413, 1415, 1417, 1419, 1421, 1423, 1425, 1427, 1429, 1431, 1433, 1435, 1437, 1439, 1441, 1443, 1445, 1447, 1449, 1451, 1453, 1455, 1457, 1459, 1461, 1463, 1465, 1467, 1469, 1471, 1473, 1475, 1477, 1479, 1481, 1483, 1485, 1487, 1489, 1491, 1493, 1495, 1497, 1499, 1501, 1503, 1505, 1507, 1509, 1511, 1513, 1515, 1517, 1519, 1521, 1523, 1525, 1527, 1529, 1531, 1533, 1535, 1537, 1539, 1541, 1543, 1545, 1547, 1549, 1551, 1553, 1555, 1557, 1559, 1561, 1563, 1565, 1567, 1569, 1571, 1573, 1575, 1577, 1579, 1581, 1583, 1585, 1587, 1589, 1591, 1593, 1595, 1597, 1599, 1601, 1603, 1605, 1607, 1609, 1611, 1613, 1615, 1617, 1619, 1621, 1623, 1625, 1627, 1629, 1631, 1633, 1635, 1637, 1639, 1641, 1643, 1645, 1647, 1649, 1651, 1653, 1655, 1657, 1659, 1661, 1663, 1665, 1667, 1669, 1671, 1673, 1675, 1677, 1679, 1681, 1683, 1685, 1687, 1689, 1691, 1693, 1695, 1697, 1699, 1701, 1703, 1705, 1707, 1709, 1711, 1713, 1715, 1717, 1719, 1721, 1723, 1725, 1727, 1729, 1731, 1733, 1735, 1737, 1739, 1741, 1743, 1745, 1747, 1749, 1751, 1753, 1755, 1757, 1759, 1761, 1763, 1765, 1767, 1769, 1771, 1773, 1775, 1777, 1779, 1781, 1783, 1785, 1787, 1789, 1791, 1793, 1795, 1797, 1799, 1801, 1803, 1805, 1807, 1809, 1811, 1813, 1815, 1817, 1819, 1821, 1823, 1825, 1827, 1829, 1831, 1833, 1835, 1837, 1839, 1841, 1843, 1845, 1847, 1849, 1851, 1853, 1855, 1857, 1859, 1861, 1863, 1865, 1867, 1869, 1871, 1873, 1875, 1877, 1879, 1881, 1883, 1885, 1887, 1889, 1891, 1893, 1895, 1897, 1899, 1901, 1903, 1905, 1907, 1909, 1911, 1913, 1915, 1917, 1919, 1921, 1923, 1925, 1927, 1929, 1931, 1933, 1935, 1937, 1939, 1941, 1943, 1945, 1947, 1949, 1951, 1953, 1955, 1957, 1959, 1961, 1963, 1965, 1967, 1969, 1971, 1973, 1975, 1977, 1979, 1981, 1983, 1985, 1987, 1989, 1991, 1993, 1995, 1997, 1999, 2001, 2003, 2005, 2007, 2009, 2011, 2013, 2015, 2017, 2019, 2021, 2023, 2025, 2027, 2029, 2031, 2033, 2035, 2037, 2039, 2041, 2043, 2045, 2047, 2049, 2051, 2053, 2055, 2057, 2059, 2061, 2063, 2065, 2067, 2069, 2071, 2073, 2075, 2077, 2079, 2081, 2083, 2085, 2087, 2089, 2091, 2093, 2095, 2097, 2099, 2101, 2103, 2105, 2107, 2109, 2111, 2113, 2115, 2117, 2119, 2121, 2123, 2125, 2127, 2129, 2131, 2133, 2135, 2137, 2139, 2141, 2143, 2145, 2147, 2149, 2151, 2153, 2155, 2157, 2159, 2161, 2163, 2165, 2167, 2169, 2171, 2173, 2175, 2177, 2179, 2181, 2183, 2185, 2187, 2189, 2191, 2193, 2195, 2197, 2199, 2201, 2203, 2205, 2207, 2209, 2211, 2213, 2215, 2217, 2219, 2221, 2223, 2225, 2227, 2229, 2231, 2233, 2235, 2237, 2239, 2241, 2243, 2245, 2247, 2249, 2251, 2253, 2255, 2257, 2259, 2261, 2263, 2265, 2267, 2269, 2271, 2273, 2275, 2277, 2279, 2281, 2283, 2285, 2287, 2289, 2291, 2293, 2295, 2297, 2299, 2301, 2303, 2305, 2307, 2309, 2311, 2313, 2315, 2317, 2319, 2321, 2323, 2325, 2327, 2329, 2331, 2333, 2335, 2337, 2339, 2341, 2343, 2345, 2347, 2349, 2351, 2353, 2355, 2357, 2359, 2361, 2363, 2365, 2367, 2369, 2371, 2373, 2375, 2377, 2379, 2381, 2383, 2385, 2387, 2389, 2391, 2393, 2395, 2397, 2399, 2401, 2403, 2405, 2407, 2409, 2411, 2413, 2415, 2417, 2419, 2421, 2423, 2425, 2427, 2429, 2431, 2433, 2435, 2437, 2439, 2441, 2443, 2445, 2447, 2449, 2451, 2453, 2455, 2457, 2459, 2461, 2463, 2465, 2467, 2469, 2471, 2473, 2475, 2477, 2479, 2481, 2483, 2485, 2487, 2489, 2491, 2493, 2495, 2497, 2499, 2501, 2503, 2505, 2507, 2509, 2511, 2513, 2515, 2517, 2519, 2521, 2523, 2525, 2527, 2529, 2531, 2533, 2535, 2537, 2539, 2541, 2543, 2545, 2547, 2549, 2551, 2553, 2555, 2557, 2559, 2561, 2563, 2565, 2567, 2569, 2571, 2573, 2575, 2577, 2579, 2581, 2583, 2585, 2587, 2589, 2591, 2593, 2595, 2597, 2599, 2601, 2603, 2605, 2607, 2609, 2611, 2613, 2615, 2617, 2619, 2621, 2623, 2625, 2627, 2629, 2631, 2633, 2635, 2637, 2639, 2641, 2643, 2645, 2647, 2649, 2651, 2653, 2655, 2657, 2659, 2661, 2663, 2665, 2667, 2669, 2671, 2673, 2675, 2677, 2679, 2681, 2683, 2685, 2687, 2689, 2691, 2693, 2695, 2697, 2699, 2701, 2703, 2705, 2707, 2709, 2711, 2713, 2715, 2717, 2719, 2721, 2723, 2725, 2727, 2729, 2731, 2733, 2735, 2737, 2739, 2741, 2743, 2745, 2747, 2749, 2751, 2753, 2755, 2757, 2759, 2761, 2763, 2765, 2767, 2769, 2771, 2773, 2775, 2777, 2779, 2781, 2783, 2785, 2787, 2789, 2791, 2793, 2795, 2797, 2799, 2801, 2803, 2805, 2807, 2809, 2811, 2813, 2815, 2817, 2819, 2821, 2823, 2825, 2827, 2829, 2831, 2833, 2835, 2837, 2839, 2841, 2843, 2845, 2847, 2849, 2851, 2853, 2855, 2857, 2859, 2861, 2863, 2865, 2867, 2869, 2871, 2873, 2875, 2877, 2879, 2881, 2883, 2885, 2887, 2889, 2891, 2893, 2895, 2897, 2899, 2901, 2903, 2905, 2907, 2909, 2911, 2913, 2915, 2917, 2919, 2921, 2923, 2925, 2927, 2929, 2931, 2933, 2935, 2937, 2939, 2941, 2943, 2945, 2947, 2949, 2951, 2953, 2955, 2957, 2959, 2961, 2963, 2965, 2967, 2969, 2971, 2973, 2975, 2977, 2979, 2981, 2983, 2985, 2987, 2989, 2991, 2993, 2995, 2997, 2999, 3001, 3003, 3005, 3007, 3009, 3011, 3013, 3015, 3017, 3019, 3021, 3023, 3025, 3027, 3029, 3031, 3033, 3035, 3037, 3039, 3041, 3043, 3045, 3047, 3049, 3051, 3053, 3055, 3057, 3059, 3061, 3063, 3065, 3067, 3069, 3071, 3073, 3075, 3077, 3079, 3081, 3083, 3085, 3087, 3089, 3091, 3093, 3095, 3097, 3099, 3101, 3103, 3105, 3107, 3109, 3111, 3113, 3115, 3117, 3119, 3121, 3123, 3125, 3127, 3129, 3131, 3133, 3135, 3137, 3139, 3141, 3143, 3145, 3147, 3149, 3151, 3153, 3155, 3157, 3159, 3161, 3163, 3165, 3167, 3169, 3171, 3173, 3175, 3177, 3179, 3181, 3183, 3185, 3187, 3189, 3191, 3193, 3195, 3197, 3199, 3201, 3203, 3205, 3207, 3209, 3211, 3213, 3215, 3217, 3219, 3221, 3223, 3225, 3227, 3229, 3231, 3233, 3235, 3237, 3239, 3241, 3243, 3245, 3247, 3249, 3251, 3253, 3255, 3257, 3259, 3261, 3263, 3265, 3267, 3269, 3271, 3273, 3275, 3277, 3279, 3281, 3283, 3285, 3287, 3289, 3291, 3293, 3295, 3297, 3299, 3301, 3303, 3305, 3307, 3309, 3311, 3313, 3315, 3317, 3319, 3321, 3323, 3325, 3327, 3329, 3331, 3333, 3335, 3337, 3339, 3341, 3343, 3345, 3347, 3349, 3351, 3353, 3355, 3357, 3359, 3361, 3363, 3365, 3367, 3369, 3371, 3373, 3375, 3377, 3379, 3381, 3383, 3385, 3387, 3389, 3391, 3393, 3395, 3397, 3399, 3401, 3403, 3405, 3407, 3409, 3411, 3413, 3415, 3417, 3419, 3421, 3423, 3425, 3427, 3429, 3431, 3433, 3435, 3437, 3439, 3441, 3443, 3445, 3447, 3449, 3451, 3453, 3455, 3457, 3459, 3461, 3463, 3465, 3467, 3469, 3471, 3473, 3475, 3477, 3479, 3481, 3483, 3485, 3487, 3489, 3491, 3493, 3495, 3497, 3499, 3501, 3503, 3505, 3507, 3509, 3511, 3513, 3515, 3517, 3519, 3521, 3523, 3525, 3527, 3529, 3531, 3533, 3535, 3537, 3539, 3541, 3543, 3545, 3547, 3549, 3551, 3553, 3555, 3557, 3559, 3561, 3563, 3565, 3567, 3569, 3571, 3573, 3575, 3577, 3579, 3581, 3583, 3585, 3587, 3589, 3591, 3593, 3595, 3597, 3599, 3601, 3603, 3605, 3607, 3609, 3611, 3613, 3615, 3617, 3619, 3621, 3623, 3625, 3627, 3629, 3631, 3633, 3635, 3637, 3639, 3641, 3643, 3645, 3647, 3649, 3651, 3653, 3655, 3657, 3659, 3661, 3663, 3665, 3667, 3669, 3671, 3673, 3675, 3677, 3679, 3681, 3683, 3685, 3687, 3689, 3691, 3693, 3695, 3697, 3699, 3701, 3703, 3705.

11. Nucleic acid encoding the polypeptide of any one of claims 1 to 4.

12. A composition comprising: (a) polypeptide, antibody, and/or nucleic acid of any preceding claim; and (b) a pharmaceutically acceptable carrier.

13. The composition of claim 12, further comprising a vaccine adjuvant.

14. Nucleic acid, polypeptide, or antibody of any one of claims 1 to 11 for use as a medicament.

15. A method of treating a patient, comprising administering to the patient a therapeutically effective amount of the composition of claim 12.

16. The use of nucleic acid, polypeptide, or antibody of any one of claims 1 to 11 in the manufacture of a medicament for treating or preventing disease and/or infection caused by H.influenzae.

17. The method of claim 15, or the use of claim 16, for preventing bacterial meningitis.

The application's sequence listing, which the Patent Office published only in electronic form, follows.

SEQUENCE LISTING (3709 sequences)

SEQ ID NO: 1 - DNA, 570 bp, Haemophilus influenzae
acaacaaactgtttagctcctttagcacgtgttgttcatgaaactttcggtatcaaagatggtttaatgaccactgttcacgcaacaactgcaactcaaaaaactgtggatggtccatcagctaaagactggcgcggcggccgcggtgcatcacaaaacatcattccatcttcaacaggtgcagcgaaagcagtaggtaaagtattacctgcattaaacggtaaattaactggtatggctttccgtgttccaacgccaaacgtatctgttgttgatttaacagttaatcttgaaaaaccagcttcttatgatgcaatcaaacaagcaatcaaagatgcagcggaaggtaaaacgttcaatggcgaattaaaaggcgtattaggttacactgaagatgctgttgtttctactgacttcaacggttgtgctttaacttctatatttgatgcagaagcaggtatcgcattaacagattctttcgttaaattggtatcttggtacgataacgaaacgggttactcaaacaaagtattagacttagttgctcacgtttacaactacaaaggctaa

SEQ ID NO: 2 - protein, 189 aa, Haemophilus influenzae
TTNCLAPLARVVHETFGIKDGLMTTVHATTATQKTVDGPSAKDWRGGRGASQNIIPSSTGAAKAVGKVLPALNGKLTGMAFRVPTPNVSVVDLTVNLEKPASYDAIKQAIKDAAEGKTFNGELKGVLGYTEDAVVSTDFNGCALTSIFDAEAGIALTDSFVKLVSWYDNETGYSNKVLDLVAHVYNYKG

SEQ ID NO: 3 - DNA, 1800 bp, Haemophilus influenzae
atgaatctcgatctccattttgttcatcgtattcaacaacaagccaaaactcgtgcaaatatgaccgcacttcgctataaagaacacggcttgtggagagacatttcttggaaaaattttcaagagcaactcaatcaactttctcgtgcattgcttgctcacaatattgacgtacaagataaaatcgccatttttgcccataatatggaacgttggacaatcgctgacattgcgaccttacaaattcgagcaatcacagtgcctatttacgcaaccaatacagcccagcaagcagaatttatcctaaatcacgccgatgtaaaaattctcttcgtcggcgatcaagagcaatacgatcaagcattggaaattgctcatcattgtccaaaattacaaaaaattgtggcaatgaaatccaccattcaattacaacaagatcctctttcttgcacttgggaaagttttattaaaacaggttcaaacgcccaacaagatgaactaacccaacgcttaaaccaaaaacaattatcggatttatttacgattatttatacctcaggcacaacgggagagcctaaaggtgtcatgttagattacgctaatctctctcaccaattagaaacacatgatctttcacttaatgtgacagatcaggatatttcactttcttttttaccattctctcatatttttgaacgggcatgggcggcttatattcttcatagaggcgcaatactttgctatttagaagacactaatcaagtgcggtcagctttaacggaaattcgcccaactttaatgtgcgccgtaccacgtttttacgaaaaaatttatgctgccgtattggataaagttcaaaaagccccaaaacttcgccaaattatgtttcattgggcaatttctgtaggacaaaaacattttgatttacgtgcgaataacaaagatattccgttcttattgaaaaaacaatttgctttggcagataaattagtgctctcaaaacttcgccaattattgggtggtcgtataaaaatgatgccttgcggaggagcaaaattagaacctgctattgggctatttttccatgctattggtatcaacatcaaattaggctatggtatgacagaaacaactgcaaccgtttcttgctggcataatttccaatttaacccaaattcaatcggcacactgatgccaaaagcggaagtgaaaattggggaaaataatgaaatccttgtgcgtggtggaatggtgatgaaaggctattacaaaaagccagaagaaacggctcaagccttcaccgaagatggtttcttaaaaactggtgatgcgggagagtttgacgaacaaggcaatttatttattaccgatcgtatcaaagaattaatgaaaacctcaaacggcaaatatatcgcaccacaatatatcgaaagcaaaatcggtaaagataaatttatcgaacaaattgcgatcatcgctgatgcgaaaaaatatgtatccgcacttattgtgccttgctttgatagtttggaagaatacgctaaacagctcaatattaaatatcatgaccgtttagaactactaaaaaattctgacattctgaaaatgtttgagcagcgtattaatgcggtacaaaaagaattggctcatttcgagcaagtaaaaaaattcacgctactttctcaagcattcagcattaaattaggcgaaattacaccaacattaaaattgcgtagaaaagtgattttagaacgttatcgcaagcaaattgaagcaatgtatcattcacaagaagcataa

SEQ ID NO: 4 - protein, 599 aa, Haemophilus influenzae
MNLDLHFVHRIQQQAKTRANMTALRYKEHGLWRDISWKNFQEQLNQLSRALLAHNIDVQDKIAIFAHNMERWTIADIATLQIRAITVPIYATNTAQQAEFILNHADVKILFVGDQEQYDQALEIAHHCPKLQKIVAMKSTIQLQQDPLSCTWESFIKTGSNAQQDELTQRLNQKQLSDLFTIIYTSGTTGEPKGVMLDYANLSHQLETHDLSLNVTDQDISLSFLPFSHIFERAWAAYILHRGAILCYLEDTNQVRSALTEIRPTLMCAVPRFYEKIYAAVLDKVQKAPKLRQIMFHWAISVGQKHFDLRANNKDIPFLLKKQFALADKLVLSKLRQLLGGRIKMMPCGGAKLEPAIGLFFHAIGINIKLGYGMTETTATVSCWHNFQFNPNSIGTLMPKAEVKIGENNEILVRGGMVMKGYYKKPEETAQAFTEDGFLKTGDAGEFDEQGNLFITDRIKELMKTSNGKYIAPQYIESKIGKDKFIEQIAIIADAKKYVSALIVPCFDSLEEYAKQLNIKYHDRLELLKNSDILKMFEQRINAVQKELAHFEQVKKFTLLSQAFSIKLGEITPTLKLRRKVILERYRKQIEAMYHSQEA

SEQ ID NO: 5 - DNA, 786 bp, Haemophilus influenzae
atgtataaagcagtatttagtgattttgatggcaccttattaacctctcaacataccatttcccctcgaactgttgcggtaattaagcgtttaacggcgaatggcattccttttgtgccaatttcggcgcgttctcctctaggtattttgccttattggaaacagcttgaaacgaataatgtgcttgttgcatttagtggcgcgcttattttgaaccaaaatctcgaaccaatttatagcgtacaaattgagccaaaagatattttagagattaataccgttttggcggatcatccgttgcttggcgtgaattattatacaaataatgattgccatgctcgtgacgtagaaaataaatgggtgatttatgaacgcagagtgaccaaaattgagattcatccttttgatgaagtagcgacaagttcgccacataaaattcaaattattggggaagcagaagaaatcattgagattgaagttcttttaaagaaaaaatttccacatttaagtatttgtcgttcccacgctaattttttagaggtaatgcacaagagtgcaaccaaaggaagtgcggtgcgttttttggaagattattttggcgtacaaactaatgaagtgattgcatttggcgataattttaatgatctggatatgctagaacatgcggggcttggtgttgcaatgggaaatgcgcctgatgaaattaaacaagctgcaaatgtggttacggcaaccaataatgaagatggacttgcattgattttagaagaaaaatttcctgaataa

SEQ ID NO: 6 - protein, 261 aa, Haemophilus influenzae
MYKAVFSDFDGTLLTSQHTISPRTVAVIKRLTANGIPFVPISARSPLGILPYWKQLETNNVLVAFSGALILNQNLEPIYSVQIEPKDILEINTVLADHPLLGVNYYTNNDCHARDVENKWVIYERRVTKIEIHPFDEVATSSPHKIQIIGEAEEIIEIEVLLKKKFPHLSICRSHANFLEVMHKSATKGSAVRFLEDYFGVQTNEVIAFGDNFNDLDMLEHAGLGVAMGNAPDEIKQAANVVTATNNEDGLALILEEKFPE

SEQ ID NO: 7 - DNA, 465 bp, Haemophilus influenzae
atgggaagtgtattggttgatttgcaaattgccacagaaaatatagagggtttgccaacagaagagcagattgtgcagtgggcaacagctgcgattcaaccagaagggaatgaagtcgaaatgacggtgcgtattgtggatgaagccgaaagccatgaattaaatttaacttatcgtggaaaggatcgcccgactaacgtgctttcatttccatttgaatgccctgacgaagtggagttgccattgttaggggatctcgttatttgtcgtcaagtcgtggagcgagaagctgcagaacaagagaaaccattaatggcacattgggcgcatatggtcgtgcatggttgtttacatttacttggttatgatcatattgaagacgatgaagcggaagaaatggaaagtttagaaacccaaattatgcaaggattaggctttgatgatccttatttagcagagaaataa

SEQ ID NO: 8 - protein, 154 aa, Haemophilus influenzae
MGSVLVDLQIATENIEGLPTEEQIVQWATAAIQPEGNEVEMTVRIVDEAESHELNLTYRGKDRPTNVLSFPFECPDEVELPLLGDLVICRQVVEREAAEQEKPLMAHWAHMVVHGCLHLLGYDHIEDDEAEEMESLETQIMQGLGFDDPYLAEK

SEQ ID NO: 9 - DNA, 813 bp, Haemophilus influenzae
atgcagtgctggattcgacaaactatcaacttttttagaaagacaaaaaatacagaaaaattgaccgcacttttgcaacaaaaagaggacatactagctgttgagataccagtttctttggtatataacggcatttctcacgcagttatgatgtgttccccaaacaatttagaggattttgctttaggtttttctctaacagagggaattatcaataaaccagaagatatttatggtattgatgttgtagaagtttgcaatggtattgaagtgcaaattgaactttccagccgtaaatttatggcattaaaagagcatcgtcgtaatcttacggggcgtactggttgtggtatttgtggtacagaacaattgaatcaagtatataaaacttttccgaaattagactgtacttttcaatttgatttaaatttgctagatagttgtcttattgatcttcaaaaaaatcaattgcttggatgtaaaactggtgctacccatgcttgtgcatttttcgatttatatggaagtatgttagctatttacgaggatgtgggtcgccacgttgcattagataaattgcttggttggcacgcaaaatcgggtaaacctagaggttttattttagcctccagtcgagcgagttatgaaatggtgcaaaaaacagtggcttgcggggtggaaatgttagtcacgatttctgccgcaacggatttagcagtaacaatggcagaaaaacataatttgactttaattggttttgctagggaaggaaaaggaaatatttatagcggacatctacgacttcacaattaa

SEQ ID NO: 10 - protein, 270 aa, Haemophilus influenzae
MQCWIRQTINFFRKTKNTEKLTALLQQKEDILAVEIPVSLVYNGISHAVMMCSPNNLEDFALGFSLTEGIINKPEDIYGIDVVEVCNGIEVQIELSSRKFMALKEHRRNLTGRTGCGICGTEQLNQVYKTFPKLDCTFQFDLNLLDSCLIDLQKNQLLGCKTGATHACAFFDLYGSMLAIYEDVGRHVALDKLLGWHAKSGKPRGFILASSRASYEMVQKTVACGVEMLVTISAATDLAVTMAEKHNLTLIGFAREGKGNIYSGHLRLHN

SEQ ID NO: 11 - DNA, 612 bp, Haemophilus influenzae
atgcagatctcaagaagaaaattcttcaagatctgtgcaggaggtatggcgggaacgtcagctgcaatgttgggctttgctccagcaaacgtattagctgcgccacgcgaatataaattattacgcgcgtttgaatcccgtaacacctgtacatattgcgctgtaagttgcggtatgttgttatatagcacaggcaaaccttacaattcattaagcagccatactggcacaaatactcgttcaaaactctttcatattgagggtgatccagatcatccagtcagtcgtggtgcgctttgcccgaaaggtgctggctcactcgattatgtcaatagtgaaagccgttctttatatcctcaatatcgtgcgcccggttctgataaatgggaacgaatttcttggaaagatgccattaaacgtattgctcgtttaatgaaagatgaccgagatgccaactttgttgaaaaagatgcaaatggaaaaacggttaatcgttgggcaacgacaggaattatgactgcatcagcaatgagcaatgaagctgcgttattaacacaaaagtggattagaatgctcggtatggtgccagtatgtaaccaagcgaatacttga

SEQ ID NO: 12 - protein, 203 aa, Haemophilus influenzae
MQISRRKFFKICAGGMAGTSAAMLGFAPANVLAAPREYKLLRAFESRNTCTYCAVSCGMLLYSTGKPYNSLSSHTGTNTRSKLFHIEGDPDHPVSRGALCPKGAGSLDYVNSESRSLYPQYRAPGSDKWERISWKDAIKRIARLMKDDRDANFVEKDANGKTVNRWATTGIMTASAMSNEAALLTQKWIRMLGMVPVCNQANT

SEQ ID NO: 13 - DNA, 2427 bp, Haemophilus influenzae
atgacaaataactgggttgatattaaaaatgccaacttaatcatcgttcaaggcggtaaccctgcagaagcccatcctgttggcttccgttgggcaattgaagcgaagaaaaacggtgcgaaaatcatcgttattgatccgcgttttaaccgtacagcatccgttgctgatcttcatgcgccaattcgttctggttctgatattacgttcttaatgggcgtgatccgttacctattggaaacaaaccaaattcaacacgaatatgttaaacactataccaacgcatcattcttaattgatgaaggtttcaaatttgaagatggtttatttgtagggtataacgaagaaaaacgtaactacgataaatctaaatggaactaccaatttgatgaaaatggtcacgctaaacgtgatatgacattacaacatcctcgttgtgtcattaacatcttaaaagagcacgtttctcgttataccccagaaatggttgaacgtattacaggcgtaaaacaaaaactcttcttacaaatctgtgaagaaattggtaaaacctctgtgccaaataaaacgatgacgcatctatatgcattaggttttacagagcattcaatcggtacacaaaatattcgctcaatggcgataatccagttacttttaggtaatatggggatgccaggtggcggtattaacgcattacgtggacactccaatgtgcaaggtacgacagatatgggcttattgccaatgtctttaccaggttatatgcgtttgccaaacgataaagatacctcttacgatcaatacattaacgcaattacaccaaaagatatcgttccaaaccaagtgaactattatcgtcatacttcaaaattctttgttagtatgatgaaaactttctacggagataatgccactaaggaaaatggctggggattcgatttcttaccaaaagcagatcgcctatatgatccaattactcacgttaaattgatgaatgaaggcaaattacacggttggattttacaaggttttaacgtattaaattcactaccaaataaaaataaaacgttatctggtatgagtaaactgaaatacttagtcgttatggatccattacaaactgaatcatcagaattttggaaaaattttggtgagtcaaatgatgtaaatcctgcagaaattcaaacagaagttttccgtttaccaactacttgttttgcagaagaagaaggatcaatcgttaattctggtcgctggactcaatggcactggaaaggttgcgatcaaccgggagaagccttacctgatgttgatattctttctatgctacgcgaagaaatgcacgaactttataaaaaagagggtggacaaggaattgaatcttttgaagcgatgacttggaattatgctcaaccacactcaccaagtgcggttgaattagccaaagaattaaatggttatgcgcttgaagatctttatgatccaaacggtaacttgatgtacaagaaaggtcaattactcaatggatttgcacatttacgtgatgatggtacaacaacatcaggtaactggttatatgttggtcaatggactgaaaaaggcaaccaaactgctaatcgcgataattcagatccatcgggtttaggttgtactattggctggggctttgcatggcctgcaaaccgccgtgtactttatagccgtgcatcattagatatcaatggtaatccttgggataaaaaccgccaattaatcaaatggaacggtaaaaactggaactggtttgatattgctgactacggtacgcaaccaccaggttctgatactgggccgttcattatgtccgcagaaggcgtaggacgtttatttgccgttgataaaattgcaaatggcccaatgccagaacactatgaaccagttgaaagtccaattgatacaaacccatttcatccaaatgtagtaactgatccaactttacgtatctataaagaagatcgtgaatttattggttcaaataaagagtatccatttgtagcaacaacttatcgtttaaccgagcatttccacagctggactgcacaatctgcattaaatatcatcgcacaaccacaacaatttgtggaaattggcgaaaaattagcggcagaaaaaggcattcaaaaaggcgatatggtaaaaattacttctcgtcgtggctatattaaagcggttgccgtggttacaaaacgtcttaaagatctcgaaattgatggacgtgtcgtacaccatataggtcttccaattcactggaatatgaaggcattaaatggcaaaggtaaccgtggtttctctacgaataccttaacaccatcttggggtgaggcaatcacgcaaacaccagaatacaaaacattcttggtaaatattgaaaaagttggggaggcataa

SEQ ID NO: 14 - protein, 808 aa, Haemophilus influenzae
MTNNWVDIKNANLIIVQGGNPAEAHPVGFRWAIEAKKNGAKIIVIDPRFNRTASVADLHAPIRSGSDITFLMGVIRYLLETNQIQHEYVKHYTNASFLIDEGFKFEDGLFVGYNEEKRNYDKSKWNYQFDENGHAKRDMTLQHPRCVINILKEHVSRYTPEMVERITGVKQKLFLQICEEIGKTSVPNKTMTHLYALGFTEHSIGTQNIRSMAIIQLLLGNMGMPGGGINALRGHSNVQGTTDMGLLPMSLPGYMRLPNDKDTSYDQYINAITPKDIVPNQVNYYRHTSKFFVSMMKTFYGDNATKENGWGFDFLPKADRLYDPITHVKLMNEGKLHGWILQGFNVLNSLPNKNKTLSGMSKLKYLVVMDPLQTESSEFWKNFGESNDVNPAEIQTEVFRLPTTCFAEEEGSIVNSGRWTQWHWKGCDQPGEALPDVDILSMLREEMHELYKKEGGQGIESFEAMTWNYAQPHSPSAVELAKELNGYALEDLYDPNGNLMYKKGQLLNGFAHLRDDGTTTSGNWLYVGQWTEKGNQTANRDNSDPSGLGCTIGWGFAWPANRRVLYSRASLDINGNPWDKNRQLIKWNGKNWNWFDIADYGTQPPGSDTGPFIMSAEGVGRLFAVDKIANGPMPEHYEPVESPIDTNPFHPNVVTDPTLRIYKEDREFIGSNKEYPFVATTYRLTEHFHSWTAQSALNIIAQPQQFVEIGEKLAAEKGIQKGDMVKITSRRGYIKAVAVVTKRLKDLEIDGRVVHHIGLPIHWNMKALNGKGNRGFSTNTLTPSWGEAITQTPEYKTFLVNIEKVGEA

SEQ ID NO: 15 - DNA, 939 bp, Haemophilus influenzae
atggctggaactgctcaaggcgttcaaacgcaagacgttattaaaatctccgcaacatctggtttaacaccagcaccacaagcgagagatcataaagttgaagtcgcaaaattaattgatgtttcaacttgtataggatgtaaagcctgtcaagtgggttgttcagagtggaatgatattcgctctgatatcaatgcacaatgtgttggggtttatgacaatccagttgatcttgatgcaaaagcatggacggtgatgcgttttaacgaagttgaagaaaacgatcgtttagaatggctgattcgtaaagatggctgtatgcactgcacagaacctggttgtttaaaggcttgtcctgcacccggtgcaatcattcaatatgctaacggtattgtagatttccaatccgataaatgtattggttgtggttattgtattgcaggctgcccattcaatattccacgaatgaatcctgaagacaatcgtgtatacaaatgtactctttgtgtggatcgtgtttctgtgggacaagagccagcttgcgtgaaaacctgtccaacaggtgctattcgtttcggttctaaagaagaaatgaaaatttacgcagaacaacgcgtggcagatttaaaatcccgtggttatgaaaacgcaggactttacgatcctccaggtgtaggcggtacacacgtaatgtatgtgttgcatcacgcagataaacctgagctttacaatggtcttccaaaagatcctcaaattgatttgagtgtgaccttatggaaagatgtattgaaaccagtcgctgcagttgcaatgggtggtctagctctagcagaagttgcgcactacttaaccgttggcccaaatgtagaagaagatgtggaagatcatcatcacgaatttgaagaaaataaatcatctaagggggaaaataatgagtaa

SEQ ID NO: 16 - protein, 312 aa, Haemophilus influenzae
MAGTAQGVQTQDVIKISATSGLTPAPQARDHKVEVAKLIDVSTCIGCKACQVGCSEWNDIRSDINAQCVGVYDNPVDLDAKAWTVMRFNEVEENDRLEWLIRKDGCMHCTEPGCLKACPAPGAIIQYANGIVDFQSDKCIGCGYCIAGCPFNIPRMNPEDNRVYKCTLCVDRVSVGQEPACVKTCPTGAIRFGSKEEMKIYAEQRVADLKSRGYENAGLYDPPGVGGTHVMYVLHHADKPELYNGLPKDPQIDLSVTLWKDVLKPVAAVAMGGLALAEVAHYLTVGPNVEEDVEDHHHEFEENKSSKGENNE

SEQ ID NO: 17 - DNA, 717 bp, Haemophilus influenzae
atgagtaaaattgaaattagcaacgatactcgcgttatccgccatagaaccccagctcgtatcagtcactggatgttggttatttgcttttttatgacgatgttcactggtgttgcatttttcttccctgactttgcttggctcacagaaattttgggtacaccacaaattgcgcgcgccattcatccattcacagggattttaatgttcttcgctttcatctacttagcgttattgtactgggatcacaatattccagaaaaaaacgatattcgctgggcaaaaggtgttattgaagttcttaaagggaatgaacacgcggttgctgataatggcaaatataaccttggtcaaaaaatgctcttttggacattaaacttggcaatggtaacgttattagtcactggcatcattatgtggcgtcaatatttttcacattacttctcaatcccagtattgcgaattgctattttactccactctgcaagtgcttttatgttattcactggtatcttagtgcatatatatatggcattttgggttaaaggatcaattcgcggtattgttgaaggttgggtaaccgttcgttgggcgaaaaaacaccacccaagatggtatcgtgaagaagttttatcaaaacttgaggaagatttactcaacgagcaatctggcaaagtaggtaaaaccaaagtcttatttaaaggatttggcaaataa

SEQ ID NO: 18 - protein, 238 aa, Haemophilus influenzae
MSKIEISNDTRVIRHRTPARISHWMLVICFFMTMFTGVAFFFPDFAWLTEILGTPQIARAIHPFTGILMFFAFIYLALLYWDHNIPEKNDIRWAKGVIEVLKGNEHAVADNGKYNLGQKMLFWTLNLAMVTLLVTGIIMWRQYFSHYFSIPVLRIAILLHSASAFMLFTGILVHIYMAFWVKGSIRGIVEGWVTVRWAKKHHPRWYREEVLSKLEEDLLNEQSGKVGKTKVLFKGFGK

SEQ ID NO: 19 - DNA, 909 bp, Haemophilus influenzae
atgagtatcaaaatcttatctgaatcagaaattaaacaagtagcaaattcatatcaagccccagcggttttatttgccaatcctaaaaatctttaccaacgcagagcgaaacgtttaagagatttagcacaaaatcatcctctatctgattatttattattcgctgcagacatagttgaaagccaactttccacgttagaaaaaaatcctttaccgccacaacagcttgaacagttaaatgctatcgagccactaaatgccaaaacctttaagagagacagtatttggcgtgaatacttaactgaaattcttgatgaaataaaacccaaagctaacgagcaaattgctgcaacaattgaatttcttgaaaaagcctcttctgctgaattagaagaaatggcaaataagctcttagcacaagaatttaatttagtcagcagtgataaagccgtctttatttgggctgcactttccctttattggttacaagcagctcaacaaattccccataatagccaagtcgaaaacgccgaaaatttacatcactgccctgtttgtggttctttacctgtggcaagtatggtacaaattggtacatcgcaaggtttacgctacttacattgtaatttatgtgaaagtgaatggaatttagtacgcgcacaatgcaccaattgtaatagtcatgacaaactcgaaatgtggtcactaaatgaagaacttgcgcttgttcgtgccgaaacctgtggtagctgtgaaagttacttgaaaattatgttccaagaaaaagatccttacgtagaactagtagccgatgatttggcttctattttcttagatattgaaatggaagaaaaaggtttcgcccgaagtggattaaatccatttatttttcctgcagaagaagcataa

SEQ ID NO: 20 - protein, 302 aa, Haemophilus influenzae
MSIKILSESEIKQVANSYQAPAVLFANPKNLYQRRAKRLRDLAQNHPLSDYLLFAADIVESQLSTLEKNPLPPQQLEQLNAIEPLNAKTFKRDSIWREYLTEILDEIKPKANEQIAATIEFLEKASSAELEEMANKLLAQEFNLVSSDKAVFIWAALSLYWLQAAQQIPHNSQVENAENLHHCPVCGSLPVASMVQIGTSQGLRYLHCNLCESEWNLVRAQCTNCNSHDKLEMWSLNEELALVRAETCGSCESYLKIMFQEKDPYVELVADDLASIFLDIEMEEKGFARSGLNPFIFPAEEA

SEQ ID NO: 21 - DNA, 441 bp, Haemophilus influenzae
atgtctattatttctcaaattgaagcctgtgatttcgagcgattgtatgaaatcgagcagcaagcccatctggtgccttggtcatttggtacgttaaaaaataatcaaggtgagcgttatctcaatttaaaattaatagagaataatcagattatcggttttgctatttgccaaaccgtattagatgaagcgactttgtttaatattgcgatttttcctacttatcaaggttgcggattcggaaaattattgttgaatgagttaatcgctcgattgaaagaaaaaggtgtccagaccttatggttagaagtcagagagtctaacccagctcgtttcttgtatgaaaaaattggttttaatgaagtggatattcggaaaaattattatcctaaacccagtggtggacgagaaaatgcagtggtaatggcgtattatctatag

SEQ ID NO: 22 - protein, 146 aa, Haemophilus influenzae
MSIISQIEACDFERLYEIEQQAHLVPWSFGTLKNNQGERYLNLKLIENNQIIGFAICQTVLDEATLFNIAIFPTYQGCGFGKLLLNELIARLKEKGVQTLWLEVRESNPARFLYEKIGFNEVDIRKNYYPKPSGGRENAVVMAYYL

SEQ ID NO: 23 - DNA, 405 bp, Haemophilus influenzae
atgaacagacgcgatcttcttttacaagaaataggcatttcccagtgggaattatatcgccccgaggtactgcaaggttcagtaggaattagtgtggcagagaatattcgctttatcactgtttccgatgaaaatatcagtagctcgcctttgttagctgatgtgctgttaagccttaatcttaaaaaagaaaattgtttatgtttgaattacgatcaaatccagcatatggaatgtaagcagcctattcgttactggttactatcagaaaataacgaccaaattgaccgcactttgccattttgcaagcaggctgagcaggtttatcgctcgccaagttggcagcaatttcaatctaatcatcaagccaaacgagcgttgtggcaacaaattcagcagccttaa

SEQ ID NO: 24 - protein, 134 aa, Haemophilus influenzae
MNRRDLLLQEIGISQWELYRPEVLQGSVGISVAENIRFITVSDENISSSPLLADVLLSLNLKKENCLCLNYDQIQHMECKQPIRYWLLSENNDQIDRTLPFCKQAEQVYRSPSWQQFQSNHQAKRALWQQIQQP

SEQ ID NO: 25 - DNA, 993 bp, Haemophilus influenzae
gtgatttctctagaaagccaagttttagaacgccatatttcattttttgatggtaaatcggtattatttgctggcggtatttctgatagttttcctcaaacattagcctcaaaatgcccatcaatccaaatttggagttgctattttgactatgcaagaacgcaaagtgcggtcaatttttccgttgaatttcaaggtcaagccgatttaatcgtttattattggactaaaaacaaacaagaagtcaatttccaactgcttcaactattagctcaagcatctattggtcaagaaatattaattattggtgaaaaccgttgtggcgtgcgttcagtagaaaaaacattatcaccctatggagaaatagcaaaaattgattctgctcgtcgttgcggtttatatcatttttcactccaaaataaaccgcactttgaacttaaaaatttctggagaacctatcaacattcaacacttgaaaacttaactatatatagtttacctggggtatttagtgcggcggaattagacacaggcacagaactgttactttcaaccattgataataaaataaaaggaaaagtgcttgatcttggctgtggcgctggggtaattggctctatgataaaaaaacgtgcgcctaacgcacaaattacaatgacagatattcacgcaatggcattagagtcagcgcgtaaaacactttctgaaaatcaattacaaggcgaggtttacgccagtgatgtcttttctgatatagaagaaaaatttgatttgatcatttctaatcctccattccacgatggcattgataccgcctatcgagcagtgacagaactcatcactcaagcaaaatggcatctcaatcaaggtggagaattacgtattgtcgccaatgcatttttgccttatcccgaattacttagacaacatttcggtgattacgaagtgcttgctcaaacaggaaaatttaaagtgtattcagtgaaaaattag

SEQ ID NO: 26 - protein, 330 aa, Haemophilus influenzae
MISLESQVLERHISFFDGKSVLFAGGISDSFPQTLASKCPSIQIWSCYFDYARTQSAVNFSVEFQGQADLIVYYWTKNKQEVNFQLLQLLAQASIGQEILIIGENRCGVRSVEKTLSPYGEIAKIDSARRCGLYHFSLQNKPHFELKNFWRTYQHSTLENLTIYSLPGVFSAAELDTGTELLLSTIDNKIKGKVLDLGCGAGVIGSMIKKRAPNAQITMTDIHAMALESARKTLSENQLQGEVYASDVFSDIEEKFDLIISNPPFHDGIDTAYRAVTELITQAKWHLNQGGELRIVANAFLPYPELLRQHFGDYEVLAQTGKFKVYSVKN

SEQ ID NO: 27 - DNA, 909 bp, Haemophilus influenzae
atgaccggacaattcgacaaaacctattgcggctttattgctatcgtaggtcgcccaaatgtgggtaaatcaacgctcttaaataaaattttaggacaaaaaatttcaattacatcgcgtaaagcacaaaccacccgtcaccgcattgttgggattaaaactgaaggtgcgtatcaagaaatctacgtggatacaccggggcttcatattgaagaaaaacgggcgattaaccgcttaatgaaccgcgccgcaagtagtgctatcggcgatgttgatttaattatttttgtcgtagatggtacacactggaatgcagatgatgagatggtgctaaacaaactacgtaatgcaaaagcacccgttgtgcttgctatcaacaaagtagataacatcaagaataaagatgatttattgccgtttattacaggtcttagcagtaaatttaactttgctcacattgtgccaatttctgcacagcgtggtaataatgttcatgaattagaaaaaattgtacgccaatctttacgtgaaggtgtgcatcattttccagaagattatgttacagaccgttctcaacgttttatggcatcggaaataatccgtgaaaaattaatgcgttttacgggtgaagaattgccttattctgttacggttgaaatcgaacaattcaaagtaaatgaacgtggcacttatgaaataaatggcttaattctcgttgaacgtgaaggtcagaaaaaaatggtcattggtgcgggcggtcaaaaaattaaaactattggtatggaagcacgtgttgatatggaacgattatttgataacaaagtccatcttgaactttgggtaaaagtgaaatctggttgggcagatgatgaacgtgcgctgcgtagtttaggatatatggatgaataa

SEQ ID NO: 28 - protein, 302 aa, Haemophilus influenzae
MTGQFDKTYCGFIAIVGRPNVGKSTLLNKILGQKISITSRKAQTTRHRIVGIKTEGAYQEIYVDTPGLHIEEKRAINRLMNRAASSAIGDVDLIIFVVDGTHWNADDEMVLNKLRNAKAPVVLAINKVDNIKNKDDLLPFITGLSSKFNFAHIVPISAQRGNNVHELEKIVRQSLREGVHHFPEDYVTDRSQRFMASEIIREKLMRFTGEELPYSVTVEIEQFKVNERGTYEINGLILVEREGQKKMVIGAGGQKIKTIGMEARVDMERLFDNKVHLELWVKVKSGWADDERALRSLGYMDE

SEQ ID NO: 29 - DNA, 684 bp, Haemophilus influenzae
atgaatcatttagatcgacttgagcgtaaaatcggctattgttttaatgatattacgctcttaaagcaggcacttacgcatagaagtgcggcaactcaacataatgaacgcctagaattcctaggcgattccattcttaatttcactatcgctgaagcactttatcatcagtttccacgttgtaatgaaggagaactgagccgtatgcgtgctactttggtacgcgaacccactttagcgattttagcgcgccaatttgaattaggcgattatatgtcgcttggttctggcgagctaaagaacggtggttttcgccgcgaatctattcttgccgattgtgtagaagcgattattggcgcaatgtctttggatcaaggattggctgtgacgacccaagtgatacgaaattggtatcaacaattattggcagaaattaaaccaggcgataatcaaaaagatgcgaaaacgcgtttacaagaatatttacaaggcaaacatttgccattgccaacttatgaagtggtcaatattcaaggggaagcccattgccaaattttcactgttgaatgcaaagtgaaaagtgcggggaaaattgaccgcacttttgtggcaaaaggatctagccgtcgtaaagctgaacaagcggcagcagaacaaattttaaaagaactggacatcaaatga

SEQ ID NO: 30 - protein, 227 aa, Haemophilus influenzae
MNHLDRLERKIGYCFNDITLLKQALTHRSAATQHNERLEFLGDSILNFTIAEALYHQFPRCNEGELSRMRATLVREPTLAILARQFELGDYMSLGSGELKNGGFRRESILADCVEAIIGAMSLDQGLAVTTQVIRNWYQQLLAEIKPGDNQKDAKTRLQEYLQGKHLPLPTYEVVNIQGEAHCQIFTVECKVKSAGKIDRTFVAKGSSRRKAEQAAAEQILKELDIK

SEQ ID NO: 31 - DNA, 1050 bp, Haemophilus influenzae
atgtcaaatttattttttgtgattttattggctgtcggttttggtgtgtggaaagttttagattattttcagttaccaaatacttttagtattttgttactaattttgaccgcactttctggcgtattatggtgttatcatcgttttgtggtgttgccaaaacgtcatcgtcaagtggcacgtgcagaacaacgttctggtaaaaccttaagtgaggaagaaaaagccaaaattgaaccgatttctgaggcttcagaatttttgtcttcactttttcctgtgcttgcagtggtatttttggttcgttcttttttgtttgaaccgtttcaaattccctctggctcaatggagtccactttacgcgttggcgattttttagttgtgaataaatatgcttatggtgtgaaagatccgattttccaaaacaccattattgcaggcgaaaaaccacaacgtggcgatgtgattgtgtttaaagcaccacaacaagcgttaattcgtactggtcttggtgcaacacgagcggcttttgcagaaaatttagcgttaagttcaaaagataatatgtctggtgtggattatattaagcgtattgttggaaagggcggagatcgcatcatttttgatgcggaacaaaaaacgctaaaagtggtatatggcaaagaaggtaaaccttgtgaaattgattgtgaaactaaggcgtttgaatatacacaaaatccaacaaatcctgcttttccgaatgaattagaattgactgaaaaaggcgatgtaacacataacgtgttaattagtgagtatcgtcgttattcagaccttgaatttttcccacaagagggaatgcaaactgcagaatggcttgtgccagaggggcagtattttgtgatgggggatcatcgcgatcacagcgatgatagccgtttctggggctttgtgcctgaaaaaaatattgtggggaaagccacttatatttggatgagcttagaaaaagaagcgaatgaatggccaacaggtttccgttttgagcgtttctttacagcaataaaataa

SEQ ID NO: 32 - protein, 349 aa, Haemophilus influenzae
MSNLFFVILLAVGFGVWKVLDYFQLPNTFSILLLILTALSGVLWCYHRFVVLPKRHRQVARAEQRSGKTLSEEEKAKIEPISEASEFLSSLFPVLAVVFLVRSFLFEPFQIPSGSMESTLRVGDFLVVNKYAYGVKDPIFQNTIIAGEKPQRGDVIVFKAPQQALIRTGLGATRAAFAENLALSSKDNMSGVDYIKRIVGKGGDRIIFDAEQKTLKVVYGKEGKPCEIDCETKAFEYTQNPTNPAFPNELELTEKGDVTHNVLISEYRRYSDLEFFPQEGMQTAEWLVPEGQYFVMGDHRDHSDDSRFWGFVPEKNIVGKATYIWMSLEKEANEWPTGFRFERFFTAIK

SEQ ID NO: 33 - DNA, 1797 bp, Haemophilus influenzae
atgaagaatattcgcaacttttctattattgcccatattgaccacggtaaatcgacactttctgaccgtttgattcaaacttgtggtggcctttcggatcgtgaaatggaagcgcaagtgctagattcaatggatcttgagcgtgagcgtggaattaccatcaaagcacaaagtgtgactttaaattataaagccaaagatggcgaaacttatcaattaaactttatcgatacgccaggacatgtggacttttcctatgaggtatctcgctctcttgctgcttgtgaaggggcattgttggtagttgatgctggtcaaggggtagaagcccaaactctagcaaactgttatactgcaatcgaaatggatttagaagtagtaccgattttaaataaaatcgacttaccagctgctgatcctgaacgcgtcgctgaagaaattgaagatattgttggaattgatgcgatggaagcggttcgatgctcagctaaaacgggtgtcggtatcgaagatgtattagaagaaatcgtggcaaaaattcctgcaccagaaggcgatcctaatgcgccattacaagcattgatcattgattcttggttcgataattatttgggcgtggtatctttagtgcgtattaaaaacggggtattacgtaaaggcgataaaattaaagtgatgtccacagggcaaacttacaacgtagatcgtttagggatttttacgccaaaacaagaagatactaccgttttagaatgtggcgaagtgggttgggtagtttgtgcgattaaagatattttaggtgcgccagtgggcgataccttaacccatcaacataattctgcaactgaagtgttgccaggctttaaaaaagtaaaaccacaggtttatgctgggcttttccctgtaagttctgatgattatgaagcgtttcgcgatgcgcttggcaaattaagtttaaacgatgcgtcacttttctatgaaccagaaacttcgaccgcgcttggttttggtttccgttgtggtttccttggacttctgcatatggaaatcattcaagagcgtctagagcgtgaatacgatcttgatttgattaccacagcaccaactgtaatttatgaagttgaaatgaccaatggtgaagtggtttatgtggatagtcctgcaaaattgcctccacttaataatattgctgaaattcgcgagccaatcgcagaatgtaatatgttagtgccgcaagaatatttaggtaacgtcattaccctttgcgtggaaaaacgtggcgtgcaaaccaatatggtatatcacggtaatcagattacgctgacttatgaaattccaatgggcgaagtggttttagatttctttgatcgtttaaaatcgacatcgcgtggttatgcttcgttagattacggttttaaacgtttccaagcggcagatatggttcgcgtggatattatgattaacagcgaacgagtggatgcgttggctttaatcgttcataaagataattcacaatatcgtggtcgtgaattggttgaaaaaatgcgtgagttaattcctcgtcagcaatttgatattgctattcaagccgcgattggtaaccatattattgctcgttctacggtgaaacaattacgtaaaaacgtattagcaaaatgttatggtggtgacgtgagccgtaagaaaaaactcttacagaagcagaaagaagggaaaaaacgtatgaagtctttaggtaacgtagaagtgccgcaagaggcgtttttagcaattttacacgtaggaaaagataaataa

SEQ ID NO: 34 - protein, 598 aa, Haemophilus influenzae
MKNIRNFSIIAHIDHGKSTLSDRLIQTCGGLSDREMEAQVLDSMDLERERGITIKAQSVTLNYKAKDGETYQLNFIDTPGHVDFSYEVSRSLAACEGALLVVDAGQGVEAQTLANCYTAIEMDLEVVPILNKIDLPAADPERVAEEIEDIVGIDAMEAVRCSAKTGVGIEDVLEEIVAKIPAPEGDPNAPLQALIIDSWFDNYLGVVSLVRIKNGVLRKGDKIKVMSTGQTYNVDRLGIFTPKQEDTTVLECGEVGWVVCAIKDILGAPVGDTLTHQHNSATEVLPGFKKVKPQVYAGLFPVSSDDYEAFRDALGKLSLNDASLFYEPETSTALGFGFRCGFLGLLHMEIIQERLEREYDLDLITTAPTVIYEVEMTNGEVVYVDSPAKLPPLNNIAEIREPIAECNMLVPQEYLGNVITLCVEKRGVQTNMVYHGNQITLTYEIPMGEVVLDFFDRLKSTSRGYASLDYGFKRFQAADMVRVDIMINSERVDALALIVHKDNSQYRGRELVEKMRELIPRQQFDIAIQAAIGNHIIARSTVKQLRKNVLAKCYGGDVSRKKKLLQKQKEGKKRMKSLGNVEVPQEAFLAILHVGKDK

SEQ ID NO: 35 - DNA, 384 bp, Haemophilus influenzae
atgattaaaggtattcaaattactcaagcggcaaatgacaatttgcttaattcattctggttattagacagcgaaaaaaatgaagcacgttgcttatgtgcaaaaggcgaattcgctgaagaccaagttgttgcagttagcgaattaggtcaaatcgaataccgtgaattaccagtaaacgtagcgccaactgttaaagttgaaggtggccaacacttaaacgtaaacgtattacgtcgtgaaacgttagaagatgcggtaaacaatccagataaatatccacaattaactatccgtgtttctggttacgcagtacgtttcaactctttaacgccagaacaacaacgcgacgtgatcactcgtactttcactgaaagcctataa

SEQ ID NO: 36 - protein, 127 aa, Haemophilus influenzae
MIKGIQITQAANDNLLNSFWLLDSEKNEARCLCAKGEFAEDQVVAVSELGQIEYRELPVNVAPTVKVEGGQHLNVNVLRRETLEDAVNNPDKYPQLTIRVSGYAVRFNSLTPEQQRDVITRTFTESL

SEQ ID NO: 37 - DNA, 660 bp, Haemophilus influenzae
atgaaaaactggacagacgttatcggaacagaaaaagcgcaaccttactttcaacacgcactacaacaggttcatcttgcaagagcaagcgggaaaacgatttatcccccacaagaagatgtatttaacgcattcaaatataccgcttttgaagatgtaaaagtggtgattttaggtcaggatccttatcatggaccaaaccaagctcatggattggctttttcagtaaaacctgaagtagccattcccccttccctattaaatatatataaagaactcacacaagatatttcgggatttcaaatgccatcaaatggttatttagtcaaatgggcagaacaaggggtattgctacttaacactgtgcttaccgtggaacgaggtatggcacattcacacgccaatttaggttgggaaaggtttacagataaagttattgcagtactcaatgaacatcgtgaaaaactggtgtttttactttggggcagtcacgcacaaaaaaaagggcaaattattgaccgcactcgtcactttgttttaacggcgccacacccttccccgttgtcagcacatcgaggtttctttggttgtcatcatttttccaaaacaaattcatatttggaaagcaatggaatgaaaccaattgattggcaaatctaa

SEQ ID NO: 38 - protein, 219 aa, Haemophilus influenzae
MKNWTDVIGTEKAQPYFQHALQQVHLARASGKTIYPPQEDVFNAFKYTAFEDVKVVILGQDPYHGPNQAHGLAFSVKPEVAIPPSLLNIYKELTQDISGFQMPSNGYLVKWAEQGVLLLNTVLTVERGMAHSHANLGWERFTDKVIAVLNEHREKLVFLLWGSHAQKKGQIIDRTRHFVLTAPHPSPLSAHRGFFGCHHFSKTNSYLESNGMKPIDWQI

SEQ ID NO: 39 - DNA, 1386 bp, Haemophilus influenzae
atgaatgaatatgattcatctaaaatggctgatcttttattaagcacccacggattagaactcacggaagcacctgaagaagcagacgtattattattaaatacctgttctattcgtgaaaaagcacaagaaaaagtgttccaccaacttgggcgttggaaagaattaaagaaaaataatccaaatttagtgattggcgtgggcggctgtgtggcttctcaagaaggggaacatattcgccatcgtgcgccttatgtggatattatttttggcccacaaactttgcatcgcttgcctgaaatgattaatcaaattcgtggcggtaaaagctctgtggttgatgtgagctttcctgaaattgagaaatttgaccgcttacctgaacctcgcgcagaaggtccaacggcatttgtttcgattatggaaggctgtaataaatattgtactttctgtgttgtgccttatactcgtggagaagaagttagccgtcccgtagatgatgtgttatttgaaattgcgcaacttgcggaacaaggtgtgcgtgaggtaaatctacttggtcaaaatgtaaatgcttatcgtgggccaacgcatgatggtcaaatttgcagctttgctgagttgcttcgtcttgtcgcatcaattgatggtattgaccgtttacgtttcacaaccagtcatccaatagaatttaccgatgatattattgatgtatatcgtgatacgcctgaattagtgagtttcttacatcttccagtgcaagcaggttctgaccgtgtattaacaatgatgaaacgtgctcataccgcattagaatataaatccattattcgtaaacttcgtgcagtgcgcccagatattcaaatcagctctgactttattgttggtttcccaggggaaacggcggaagattttgagcaaactatgaatttgattgcacaagtaaactttgatatgagcttcagttttgtttattccgcccgaccaggtacgccagcagcagatatgccagatgatgtgacggaagatgaaaagaaacagcgtctttatgtgctacaagagcgtattaatcaacaagcggcacaatttagccgtcgtatgcttggcacagagcagcgcgtgttagttgaaggcccatcgaagaaagatattatggaattaacaggacgcactgaaacaaatcgtattgttaatttccaaggttctccagaaatgatcggtaagtttgtggatgtgaaaatcactgatgtttatactaattcgttacgtggcgaagtggtgcgtactgaagatgaaatgggattacgtattgcgcaatctccacaagaagtgatgaatcgcacacgtaaagaagatgaattaggcgtagggcgttatcacggctaa

SEQ ID NO: 40 - protein, 461 aa, Haemophilus influenzae
MNEYDSSKMADLLLSTHGLELTEAPEEADVLLLNTCSIREKAQEKVFHQLGRWKELKKNNPNLVIGVGGCVASQEGEHIRHRAPYVDIIFGPQTLHRLPEMINQIRGGKSSVVDVSFPEIEKFDRLPEPRAEGPTAFVSIMEGCNKYCTFCVVPYTRGEEVSRPVDDVLFEIAQLAEQGVREVNLLGQNVNAYRGPTHDGQICSFAELLRLVASIDGIDRLRFTTSHPIEFTDDIIDVYRDTPELVSFLHLPVQAGSDRVLTMMKRAHTALEYKSIIRKLRAVRPDIQISSDFIVGFPGETAEDFEQTMNLIAQVNFDMSFSFVYSARPGTPAADMPDDVTEDEKKQRLYVLQERINQQAAQFSRRMLGTEQRVLVEGPSKKDIMELTGRTETNRIVNFQGSPEMIGKFVDVKITDVYTNSLRGEVVRTEDEMGLRIAQSPQEVMNRTRKEDELGVGRYHG

SEQ ID NO: 41 - DNA, 1440 bp, Haemophilus influenzae
atggcattatccaaaaatacaaaactggtgattttaatggctatcccattgatcactttcttactacctgctcctgatgggctttctttgattgcttggcgattacttggtgtttatatcgccactatcgttgggcttgtgcttaaaccttatggcgagcccgttatcttattggctgcaattgcggtttctggcgttatcatcggtaatactgaaggggcgaaagaattggttaaagtcggcaatatgttggatggttataaatctggcacaacatggcttatttttaccgcattcactttgagttcagcatttgtaatcacaggtctaggtaaacgtatcgcctatcatatgatcggcgcaatgggtagcacaaccctacgcttaggctatgttaccatgttcttagatcttttactctcgccagcaacgccctctaacaccgcgcgttcaggtgggattatctttccaatcattaatagcgtagtggttgctcttggttcagatccagaaaaaagcccgaaaaaagcagggcgttatttgatgatgaacgtatatatggtggttaaaactacctcttatattttcttaaccgcaatggctcctaatgccttagctctttcattaatggcaccaattcttggttttgaaaccacttggatcaaatggttcttagctgcatccgtacccggcttactctgcttattcttaattccgttaatttgttattgggtatctccaccagaattgaaaaaagtggataataaagctattgcgaaaaaaggcttagaagaattaggtccaatgtcttttcgtgaaaaagcactcagcgtgttattcgtaattgcattattcggctggattttctctaattcacttcatatcaatgctaccattgttgcaatcattgtaatggtgctttgtattgtattaagtatcgtcacctgggacgatatcctaaaaagcaaaggcgcatggaataccctagtatggtatggtggtatcatcggtatgtctggcttgcttgaaaaatctggctttttcaaatggttagcaaacaccttaagtaccatacttcagtttgagggacatggtatgatggcgttaatagtgattcttaccttaagtgtctctgtacgttatttattcgcatcaggcggtgcatatgtagctgcaatggtacccgtatttgcaacagtcggacatgtaacaggcgctcctactgaattgcttgctctaggcttagtctttgctaattcttatggtggttcagtaactcactacggaggcggaccaggtccaattgcattcggtgcaggttataatgatataaaatcttggtggattactggcgcgatcattgcttttggtagtttaattatccatctaactatcggtatggcatggtggaaattattaatgagtttaggctggttataa

SEQ ID NO: 42 - protein, 479 aa, Haemophilus influenzae
MALSKNTKLVILMAIPLITFLLPAPDGLSLIAWRLLGVYIATIVGLVLKPYGEPVILLAAIAVSGVIIGNTEGAKELVKVGNMLDGYKSGTTWLIFTAFTLSSAFVITGLGKRIAYHMIGAMGSTTLRLGYVTMFLDLLLSPATPSNTARSGGIIFPIINSVVVALGSDPEKSPKKAGRYLMMNVYMVVKTTSYIFLTAMAPNALALSLMAPILGFETTWIKWFLAASVPGLLCLFLIPLICYWVSPPELKKVDNKAIAKKGLEELGPMSFREKALSVLFVIALFGWIFSNSLHINATIVAIIVMVLCIVLSIVTWDDILKSKGAWNTLVWYGGIIGMSGLLEKSGFFKWLANTLSTILQFEGHGMMALIVILTLSVSVRYLFASGGAYVAAMVPVFATVGHVTGAPTELLALGLVFANSYGGSVTHYGGGPGPIAFGAGYNDIKSWWITGAIIAFGSLIIHLTIGMAWWKLLMSLGWL

SEQ ID NO: 43 - DNA, 1398 bp, Haemophilus influenzae
ttgcagcatttttttacgacattctctacagagggttcaaaaatttcacttgaagcattgcttaatgctcgagaggaacgtgcaattttacaacaacagcttataacacaatatggacaaaccttactttgcatcactttaactgctgtgggtggcgtaaaaaaaaatgctttgttggattatgtttttacaaaagctctagagaatctgaccgcactttttactcagttaaacatcacagcagtaaaagaaatagtccgtccgttagaaacggggcatgaagcctattttgtagtaccgatagatgctcgtacgctaaaagtgctgatgattgaattggaagaaagtattcctcttgctcgtttgtgggatttagatgtgtttaatgctaaaggcaatctactgagtcgtacagattttgatctttctccaagaacttgtttagtgtgcggagaaaatgcaaaaatctgtgcgagaacccgcaagcacgagattgatgagattgtagataaaattcaatctctcgcacagaatcatgatttcgcagaacatattggtgaacaagtttatctggcattaatacaagaggctcgcttatcgccaaaacctggtttagtggatgccatcaataacggttcgcacaaagatatgaacctacatacttttgagcaaagtgcgattagtttaaaacctttttttacgcagtttgttctcaaaggcatgatgaccgcgcatttgtctgaaaatcaaattctctctgaaattcgtcctttaggtttattagcagaaaaagcaatgtttaaagttactgatggcgtaaacacccacaaaggagctattttttcttttggtttagtgtgtacggcaattggacgattattggcacaaaaaagtttggttcaaagtgcggtagattttgatgttaaattaatctgctcacttgttgcacaatttactcaaggtttaacggatgaactgaaaaattatcctgaacacttgcctagtacggctggagtgcgtttattccaaaaatatggcttaacaggtgtccgtggcgaagcagaaaatggttttaatctcattcaaacgttgttgccacaatttgatgagtaccatcagttagaatgggaacatcgtttactgattttgttattgaatttaatggcaattaactccgacactaacgtggttcatcgaggtggtttagcgggattacatttcatacagcaaacagcacaggatctgcttacagatcaacgccttgtgacagataaaacagcactgacacaagcattaatgaaatttgataccgcctgcattgaacgtaatttaagttcgggcggtagtgctgatttattagcactaacaattttctttttatcatttagaggtaattaa

SEQ ID NO: 44 - protein, 465 aa, Haemophilus influenzae
MQHFFTTFSTEGSKISLEALLNAREERAILQQQLITQYGQTLLCITLTAVGGVKKNALLDYVFTKALENLTALFTQLNITAVKEIVRPLETGHEAYFVVPIDARTLKVLMIELEESIPLARLWDLDVFNAKGNLLSRTDFDLSPRTCLVCGENAKICARTRKHEIDEIVDKIQSLAQNHDFAEHIGEQVYLALIQEARLSPKPGLVDAINNGSHKDMNLHTFEQSAISLKPFFTQFVLKGMMTAHLSENQILSEIRPLGLLAEKAMFKVTDGVNTHKGAIFSFGLVCTAIGRLLAQKSLVQSAVDFDVKLICSLVAQFTQGLTDELKNYPEHLPSTAGVRLFQKYGLTGVRGEAENGFNLIQTLLPQFDEYHQLEWEHRLLILLLNLMAINSDTNVVHRGGLAGLHFIQQTAQDLLTDQRLVTDKTALTQALMKFDTACIERNLSSGGSADLLALTIFFLSFRGN

SEQ ID NO: 45 - DNA, 1503 bp, Haemophilus influenzae
atgacaacaagagaacaacgtattgaaaaatatcacgctgatcgctcagtctatcaagaggtgcctaaatctgaatccctttctcgtacagcgaaagatcgcaaactttgtacctctctagaagaagcgattaaacgctctggcttaaaagatggtatgactgtttcatttcatcatgcttttcggggcggagattttgtggtgaatatggtgatgaataaaattgccgaaatgggtttcaaaaatctgacccttgcatcttcatctttaattgatagccacttcccgattgtcgaacatatcaaaaatggcgtggtcaccaaaatctattcttctggtttacgcggtgaacttgcagagcaaatctctcgcggtttattgaatgaacctgtaaatattcattctcatggtggacgtgttcacttagtaaaatctggagaattaaaaattgacgttgcttttttaggcgtgccttgctgtgacacattcggtaatgccaatggatttactggaaaaagtaaatgcggctctctaggctatgcgcgtgtcgatgctgaatatgctgacaaagttgtgttgctcacagaggaatttgttgaatacccgcaccacccaatcagcatagctcaagatcaagtagatttaatcgtgcaagttgaagcagtcggtgacccgaaaaaaattggtggtggtgcaacccgaatgactaccaatccacgcgaattactcattgcgcgtaaatgtgcagaagtaatttttgccagtggttattttaaagatggcttctcattacaaactggttctgggggggcagcattagctgttacacgctttctagaagaaaaaatgcgtcgtgaaaatatcactgcagatttcgcacttggcggaattactgcaagtatggtggcattacatgaggctggtcttattaaaaaattattagatgtacaaagctttgattctgttgcagctgaatcacttgcccgtaacccaaatcatattgaagtctccgctaaccaatatgcgaattacagttccaaaggcgcatctgttgaacgtttagatatggtgattctttctgctttagaaatcgacactaaatttaacgtgaatgtattgactggctctgacggtgtgattcgcggtgcatctggtggtcattgtgataccgcagcttctgcacaagtagcaatcattgtggcaccattagttcgtggtcgtattccaaccgtggtggaaaacgtgattacctgtgtaacacctggtgaaaacgtcgatattctcgttaccgatcatggtgtagcagtaaatcctaaacgtccagatttgattgaagctttaagcaaaacagacattccattgtttactattgaacaactttgtgaacgtgcttacagcattactggtaaaccaaaagaaattgagtttactaataaacctgtggctgttgttcgttatcgtgatggttcggtgattgatacggtgtatcaagttaaagactag

SEQ ID NO: 46 - protein, 500 aa, Haemophilus influenzae
MTTREQRIEKYHADRSVYQEVPKSESLSRTAKDRKLCTSLEEAIKRSGLKDGMTVSFHHAFRGGDFVVNMVMNKIAEMGFKNLTLASSSLIDSHFPIVEHIKNGVVTKIYSSGLRGELAEQISRGLLNEPVNIHSHGGRVHLVKSGELKIDVAFLGVPCCDTFGNANGFTGKSKCGSLGYARVDAEYADKVVLLTEEFVEYPHHPISIAQDQVDLIVQVEAVGDPKKIGGGATRMTTNPRELLIARKCAEVIFASGYFKDGFSLQTGSGGAALAVTRFLEEKMRRENITADFALGGITASMVALHEAGLIKKLLDVQSFDSVAAESLARNPNHIEVSANQYANYSSKGASVERLDMVILSALEIDTKFNVNVLTGSDGVIRGASGGHCDTAASAQVAIIVAPLVRGRIPTVVENVITCVTPGENVDILVTDHGVAVNPKRPDLIEALSKTDIPLFTIEQLCERAYSITGKPKEIEFTNKPVAVVRYRDGSVIDTVYQVKD

SEQ ID NO: 47 - DNA, 876 bp, Haemophilus influenzae
atgaaattaagaagaagtatgttatttgtgccgggctcaaatgccgccatgttaagtaatagctttatttataaaccagattccattatgtttgacttagaagatgcggttgctctcaaagaaaaagattctgctcgtttattagtcgctcatgcacttcaacatccgctttataaagaaattgagaccgtagttcgtgttaatccgctagattctgaatttggtttattggatttggattcggtagtgcgtgcgggtgtggatgtggtacgtatgccaaaaactgaaagcgcgcaagatgtgttggatatggatcacgccattactgagattgagaaagcttgcggtcgagaagcaggttcgactaaaatgctagccgccatcgaatcgccattaggtatcactcaagccaaccaaatcgctttcgcttctaaacgtttaattggtatcgcattgggtgcagaggattacgtacgtaacttaaaaaccgagcgttcaccagaggggattgaactgctttttgctcgttgttctattttacaagcggcacgtgcggctggcattcaggcttttgataccgtatattctaacgcgaacaatgaagaaggcttcttaaaagaggctgcgttaattaaacagcttggttttgacggtaaatccttaatcaacccacgccaaattgaattgttacacaacttatttgcaccgacacaaaaagatgtggagcaggcaaaacgcattattgaagcggcagcagaagctgaacgacaaggggctggtgttgtttcgttaaacggtaaaatgattgacgcaccgattattgatcgcgcaaaacttgtattagaacgtgcgaaatcaggtattcgtgaagagtaa

SEQ ID NO: 48 - protein, 291 aa, Haemophilus influenzae
MKLRRSMLFVPGSNAAMLSNSFIYKPDSIMFDLEDAVALKEKDSARLLVAHALQHPLYKEIETVVRVNPLDSEFGLLDLDSVVRAGVDVVRMPKTESAQDVLDMDHAITEIEKACGREAGSTKMLAAIESPLGITQANQIAFASKRLIGIALGAEDYVRNLKTERSPEGIELLFARCSILQAARAAGIQAFDTVYSNANNEEGFLKEAALIKQLGFDGKSLINPRQIELLHNLFAPTQKDVEQAKRIIEAAAEAERQGAGVVSLNGKMIDAPIIDRAKLVLERAKSGIREE

SEQ ID NO: 49 - DNA, 288 bp, Haemophilus influenzae
atgaaaataacaaaagtagccgttgcagggacactggaatccagtgatgttcaagtacgggttcaaccttttgattcactcgatattgaaatcaatagctcagtagcaaaacaatttggtgaacaaattgaagcgacagttcgtgaagtattagcaaaactaggcattacagcagcacaagtcattgtagaagacaaaggggcgttagattgcgtgttacaagctcgagtaaaagctgctgcaatgcgtgcaactgatgaaacgattaactgggaggctgtgctatga

SEQ ID NO: 50 - protein, 95 aa, Haemophilus influenzae
MKITKVAVAGTLESSDVQVRVQPFDSLDIEINSSVAKQFGEQIEATVREVLAKLGITAAQVIVEDKGALDCVLQARVKAAAMRATDETINWEAVL

SEQ ID NO: 51 - DNA, 1008 bp, Haemophilus influenzae
atgcaatttgagcgaatttctactgaacaaaaaaaactttctctcattcagacatttttacatcaaaatgcgcttaaattagatgaacaaatcgagtattttgttgttggttataatgataacgaacaaatcgttgtctgtggcggtttagcaggcaatatcataaaatgtgttgcgattgatgagtctttgcgtggtagcggtgttgccttgcaattaattactgaattggttgatttagcttacacgctaaaacgcccacacctttttatttatacaaaacccgaatatgcaacgttgttcaaatcttgtggtttttatatcatctctgatgccaatccttatgtagtattgttagaaaatagtgctacgcgtttacacaaacaatgctcattatgggagaaaatgcgtgtggatggtaatcgaattggctcgattgtaatgaacgcgaatccatttaccttaggtcatcgttatttaattgagcaagcattacaacaatgtgatcatctgcatttatttattgtcggtgaagacgcatcgcaattttcttacactgaacgatttgaaatgattaaacaaggtattttcgatttatccaatatcactcttcattctggctctgactatattatttctcgtgcaacatttccaaattatttcctaaaagatcaattaattacagatgaaagttattttgagattgatctgaagttattccgtttacatattgctcaagctttgggaataacacatcgctttgttggtactgagctaaattgtcccgtcactgccgaatataatcgccaaatgcattattggttaatggatgccgaaatgaatgcaccaaaaataaatgttattgagatacctagaaaaacagcaagcaaccacattatttctgcttctacagtacgaaagcatttggctgaaaaaaattgggctcaactcgcagagtttgtgcctatgactacgttaaattatttacaaaagtgcggtcgtttttaa

SEQ ID NO: 52 - protein, 335 aa, Haemophilus influenzae
MQFERISTEQKKLSLIQTFLHQNALKLDEQIEYFVVGYNDNEQIVVCGGLAGNIIKCVAIDESLRGSGVALQLITELVDLAYTLKRPHLFIYTKPEYATLFKSCGFYIISDANPYVVLLENSATRLHKQCSLWEKMRVDGNRIGSIVMNANPFTLGHRYLIEQALQQCDHLHLFIVGEDASQFSYTERFEMIKQGIFDLSNITLHSGSDYIISRATFPNYFLKDQLITDESYFEIDLKLFRLHIAQALGITHRFVGTELNCPVTAEYNRQMHYWLMDAEMNAPKINVIEIPRKTASNHIISASTVRKHLAEKNWAQLAEFVPMTTLNYLQKCGRF

SEQ ID NO: 53 - DNA, 963 bp, Haemophilus influenzae
atgtctacgcctttcaaaatggaacgcggtgtaaaatatcgcgatgcggcaaaaacctcaattattcccgtaaaaaatatcgatcctaatcaagagttattaaaaaaaccagaatggatgaaaattaaacttccagcaagttcagctaaaattgaaagcattaaaaatggaatgcgccgtcacgggttacattctgtttgtgaggaagcatcttgtccaaatttacacgaatgttttaatcatggcacagccacttttatgattttaggtgcaatttgcacgcgccgctgcccattctgtgatgtggctcacggtaaaccattaccgcctgatcctgaagagccacaaaaattggcagaaacgattcaagatatgaaacttaaatatgtggtaatcacatcggtggatcgtgatgacttgcctgatcgtggtgctggtcattttgcagaatgtgtaaaagctgtgcgcgagcttaatcctaacattaagattgaaattttagtgcctgattttcgtggtcgtattacacaggctttagagaaattaaaagataatccgccagatgtctttaaccataatttagaaaacgtaccgcgcttatataaagaaattcgtccaggtgcggattacgaatggtcacttaaattattgcgtgaattcaaagaaatattcccaaatatcccaaccaaatctggtttaatggttgggttaggcgaaaccaacgaggaaattttgcaagtgatgcaagatttacgtgataacggtgtgactatgctcacgttgggtcaatatcttcaacctagccgccatcatttgcctgttgcccgttatgtgccgccaactgaatttgatgaattccgtgataaagccaatgaaatgggctttgaacatgcggcttgtgggccatttgttcgctcttcttaccacgctgatttacaagccagtggcggattagtgaaataa

SEQ ID NO: 54 - protein, 320 aa, Haemophilus influenzae
MSTPFKMERGVKYRDAAKTSIIPVKNIDPNQELLKKPEWMKIKLPASSAKIESIKNGMRRHGLHSVCEEASCPNLHECFNHGTATFMILGAICTRRCPFCDVAHGKPLPPDPEEPQKLAETIQDMKLKYVVITSVDRDDLPDRGAGHFAECVKAVRELNPNIKIEILVPDFRGRITQALEKLKDNPPDVFNHNLENVPRLYKEIRPGADYEWSLKLLREFKEIFPNIPTKSGLMVGLGETNEEILQVMQDLRDNGVTMLTLGQYLQPSRHHLPVARYVPPTEFDEFRDKANEMGFEHAACGPFVRSSYHADLQASGGLVK

SEQ ID NO: 55 - DNA, 639 bp, Haemophilus influenzae
atgaacaattcccttatcgttcgtcagttaggattgcaagattatcaagaaatttggcacaaaatgcaggattttactgatactcgaaatgctgaaacgcaagacgaaatttggttagtacaacattatcctgtttttacacaagggcaagcaggtaaaccagagcatcttttacaacgtagtgaaatccctgtggtgcaatcggatcgtggtgggcaaattacctatcacgcacctggtcagcaagtgatgtatgtgcttattgacattaaacgccataaaaatttaaatgtacgtcaattagttaccgcacttgaacaaacggtggttaaaactttgactgaatatggcattgaaagctatccaaagcctgatgcgccaggtgtttatgtggatggaaaaaagatttgttctcttggattacgtattcgtcgtggttgctcttttcacgggttggcattgaatattaatatggatcttaatcctttccattgtattaatccttgtggttatgcagggcttgaaatgtgtcagttagcggattttgttaatcaagatgaagctgattgcgataatgtttcagcaaaattaattaaacacttcgccgatcttttaggctataatataacaactttataa

SEQ ID NO: 56 - protein, 212 aa, Haemophilus influenzae
MNNSLIVRQLGLQDYQEIWHKMQDFTDTRNAETQDEIWLVQHYPVFTQGQAGKPEHLLQRSEIPVVQSDRGGQITYHAPGQQVMYVLIDIKRHKNLNVRQLVTALEQTVVKTLTEYGIESYPKPDAPGVYVDGKKICSLGLRIRRGCSFHGLALNINMDLNPFHCINPCGYAGLEMCQLADFVNQDEADCDNVSAKLIKHFADLLGYNITTL

SEQ ID NO: 57 - DNA, 279 bp, Haemophilus influenzae
atgacaatagaaaacgattatgcaaaactcaaggaattaatggaatttccagcaaaaatgacttttaaagttgcgggaattaatcgagaagggttagcacaagatcttatacaagtggtgcaaaaatatattaaaggcgattatattccaaaagaaaagcgcagtagtaaaggcacttataattcagtttcaattgatattattgctgaaaactttgatcaggtagaaacactctataaagaactggctaaagttgaaggcgtgaaaatggttatttag

SEQ ID NO: 58 - protein, 92 aa, Haemophilus influenzae
MTIENDYAKLKELMEFPAKMTFKVAGINREGLAQDLIQVVQKYIKGDYIPKEKRSSKGTYNSVSIDIIAENFDQVETLYKELAKVEGVKMVI

SEQ ID NO: 59 - DNA, 1182 bp, Haemophilus influenzae
atgttgaaaagaacaacaaaaatcgcatttttatcaagttttgtgacacttagcagtttttccgtatctgcagaggatatgcagtttggcgtaactccaccacaaattacggctcaaacgtatgtattgatggattataattcaggcgcaattttgaccgcacttaatccagatcaacgtcaatatccagcatcactgactaaaatgatgacaagttatgtagttggtgtcgcattaaaacaaggcaaaatccataataccgatatggttaccattggtgaaagtgcgtgggggcgtaatttccctgattcatcaaaaatgtttttagatttaaatacacaagtatctgtagcagacttaaatcgaggtgtgattgttgtttctggtaatgatgcgactgttgcattagctgaacatatttctggcaatgtaccgaactttgtagaaacaatgaataaatatgttcaacaatttggtttgaaaaataccaatttcaccacgccccatggtttagacgatccaaatcaatattcttccgcgcgtgatatggcaattattggtgcacatattattcgtgatttacctgaagaatataaaatttactccgaaaaagactttacatttaataaaatcaaacaacctaaccgtaatggactattatgggataaaactatcaatgttgatggaatgaagacagggcatactagccaagcaggatataacttagtcgcttcagcgactacatcaaacaatatgcgtttaatttctgtagtaatgggtgtgccaacttacaaaggtcgtgaagtagaaagtaagaaacttttacaatggggttttgctaatttcgaaacatttaaaactttagaggctggtaaagaaatttcagaacaaagggtttattatggcgataaaaattcagtaaaacttggtgctttcatggatcactttattacgatacctaaaggtaaacaaagtgaggttaaagctcgttatgaattagcagataaaaatttacaagcaccattagcaaaaggtcaagtgattggtaaagtggtttatcaactggatggtaaggatattgcaagtgccaatttacaagtgatgaatgatgtgggagaagcgggtatttttggtaaactatgggattggttagtattgactgtgaaagggttattttcataa

SEQ ID NO: 60 - protein, 393 aa, Haemophilus influenzae
MLKRTTKIAFLSSFVTLSSFSVSAEDMQFGVTPPQITAQTYVLMDYNSGAILTALNPDQRQYPASLTKMMTSYVVGVALKQGKIHNTDMVTIGESAWGRNFPDSSKMFLDLNTQVSVADLNRGVIVVSGNDATVALAEHISGNVPNFVETMNKYVQQFGLKNTNFTTPHGLDDPNQYSSARDMAIIGAHIIRDLPEEYKIYSEKDFTFNKIKQPNRNGLLWDKTINVDGMKTGHTSQAGYNLVASATTSNNMRLISVVMGVPTYKGREVESKKLLQWGFANFETFKTLEAGKEISEQRVYYGDKNSVKLGAFMDHFITIPKGKQSEVKARYELADKNLQAPLAKGQVIGKVVYQLDGKDIASANLQVMNDVGEAGIFGKLWDWLVLTVKGLFS

SEQ ID NO: 61 - DNA, 735 bp, Haemophilus influenzae
atgcctgcgccaaggacttattcagtaaaagggcaaacttataccactaaaagtgggaatgaagccaaattttatattaaagaaggtttagcaagttattatcatcttaaatttgatgggcgcaaaacagcaagtggcgatgtttataactcaaaacaatttactgcagcacataaaacattgccaataaattcttatgctttagtgacaaatttacataacaatcgtaaagttatcgtacgtattaatgatcgtgggccttttagtgataaacgtttaattgatctttcacacgctgcggcaaaagaaattggcttaatttcccgtggcatagggcaggtaagaattgaggcgttgcacgttgctaaaaatgggaatttatcaggcgcagccacaaaaacactggctaaacaagcaaaaactcaggaagctgtcgatcgtttagtattaaaatctaacacactttttgataacgcatctaagtcaataaatgctctaaaaggaaccgaattttaccgtttgaaaatgcttgaattaacctctcgtagccaagcaaataaattaattacgcaacttgcgttagcgaatattcagactgaagtgaatagggcaggaaataaatatgaaatttatattgggccttttgataataaagcacaaatggcacaagtgagaaccaaattacaaaaaatggcaaataataagccactaattgtttacacatataaaaattaa

SEQ ID NO: 62 - protein, 244 aa, Haemophilus influenzae
MPAPRTYSVKGQTYTTKSGNEAKFYIKEGLASYYHLKFDGRKTASGDVYNSKQFTAAHKTLPINSYALVTNLHNNRKVIVRINDRGPFSDKRLIDLSHAAAKEIGLISRGIGQVRIEALHVAKNGNLSGAATKTLAKQAKTQEAVDRLVLKSNTLFDNASKSINALKGTEFYRLKMLELTSRSQANKLITQLALANIQTEVNRAGNKYEIYIGPFDNKAQMAQVRTKLQKMANNKPLIVYTYKN

SEQ ID NO: 63 - DNA, 1116 bp, Haemophilus influenzae
atggaagataaaatccctttttggttgcgtgtttggcaacgtttgcatattgatttttggctgtttatcgggcttcttgcaataactgcttatggtatgctggtgttatatagtgcatcaggtgccagtgaaacgatgtttaatagccgaattattcaggtcttacttggatttattgttatgctgttaatggctcaatttccaccaagattttaccaacgcatcgcaccttatctttatttaattggttttgtgttattgatcttggtagatgttattggtacgacaagtaaaggtgcgcagcgttggcttgatcttggatttattcgttttcaaccctctgaaattgtaaaacttgctgtgccattaatggtggcggtgtatttaggtaatcgcccgcttccacctaaattaagtgaaacatttatagcgattgcaatgattctactgccaacattgcttgtggcgattcagcctgatttaggcacagcaattttggtcagtgcgtcaggtttatttgtcgtgtttttagcaggaatgagctggtggcttattttagcggcagtgattggcttagctggatttattccgatcatgtggttatatctaatgcacgattatcaacgcactcgcgttctcacattattggacccagaaaaagatcctctcggtgctggctatcatattttacaatcaaagattgcgattggttctggtggattaagcggaaaaggctggatgcaggggactcaatcacaattagaatttttgcccgaacctcatacagattttatttttgcggtaatgggtgaagagcacggaatgattggttttttgattttaatggcgatttacttgtttattattgtgcgaggtttaatgattgccgtaaatgctcaaacttcttttgggcgtattcttgctggtgcaacaacattaattttctttgtttatgtatttgtgaatattggaatggtaagcggaattttgcctgttgtgggtgtgccattacctttatttagttatggtggtacctcttatgttgcgattatggcaagttttggtttactgatgtctattcatacgcataaaagtcaatttatgaaaaggagctaa

SEQ ID NO: 64 - protein, 371 aa, Haemophilus influenzae
MEDKIPFWLRVWQRLHIDFWLFIGLLAITAYGMLVLYSASGASETMFNSRIIQVLLGFIVMLLMAQFPPRFYQRIAPYLYLIGFVLLILVDVIGTTSKGAQRWLDLGFIRFQPSEIVKLAVPLMVAVYLGNRPLPPKLSETFIAIAMILLPTLLVAIQPDLGTAILVSASGLFVVFLAGMSWWLILAAVIGLAGFIPIMWLYLMHDYQRTRVLTLLDPEKDPLGAGYHILQSKIAIGSGGLSGKGWMQGTQSQLEFLPEPHTDFIFAVMGEEHGMIGFLILMAIYLFIIVRGLMIAVNAQTSFGRILAGATTLIFFVYVFVNIGMVSGILPVVGVPLPLFSYGGTSYVAIMASFGLLMSIHTHKSQFMKRS

SEQ ID NO: 65 - DNA, 1857 bp, Haemophilus influenzae
ttggggattttgttactaacaggggtgttatttaccaatatttatcagctacagattgttaatttcaatacttaccaaacgcgttctaatggtaaccgaattaaattattacctttaccgccaacgcgtggcttaatctatgatcgttacggaaaattattagctgagaacctgactttttttggtttatacattgtgccagaaaaaactgaaaatttagaccgcactttagatgaattacgctatattgtgggattgacggataatgatattgaaaattttaaaaaggaacgtcgccgcggaacgcgttatacaccgattttattaaagccgaatttaacagaagaacaaatttcacgctttgcggtaaatggctaccaatacccgagtttagaggtacgtccttatttcaaacgccattatttatatggcgaaacaatggcgcatattttgggatatgtaggtaaaatgaatgataaagatgtagaacgtttgaaacgagaggataaatttgcgaattatgcggggacgaacgatattggaaaattgggtattgaacgttattacgaggatatactgcaaggtaccacgggttttgaagaagtagaaattaataatcgcggtaaagtaatccgtactttgcgtagccgacctgctgtggcgggaaaaagtattcatttaactattgatttggcattacagcgttatattactgaacttttatcgggactaaaaggtgctgtagttgtgcttgatccgaaagatagtagtgtattagcgatggtatctacaccaagttatgacaataatttgtttgttgatggtatttcctccgaagattataaacgtttattaaatgatcctgctcgtccgctttatagtcgtgcgacacaaggtgcgtatccgcccgcttcaacagtcaaaccttttattgcagtagccgcacaaactgaaaatgtgattacaccaaacacaacgatttttgatccgggatattgggtattacctaactccacaaaacgttttcgtgattggaaaaaaacaggccacggagatacggatttggataaagcgattactgaatcctctgatacttatttttatcaagtggcttataatatgggtattgatcgcctttctaattggatgaaggattttggttttggtatgccaacggggattgaaattcaagaagaaacggctgccaatataccaactcgagaatggaaacaaaaacgttataaacgcccttgggtgcaaggtgatacgatttcggttgggattggtcaaggttattggacggcaacaccactacaagtagcaaaagcgacgacaatattggtcaataatggcaaagtaaatacaccgcatttgatgaaagcaattgaaggtgcagtattagagccttatgaagatccgttactttatcctgatattaacacacctaaagtggcagcttgggaggcagcgaaacgcggtatgtacaatgttgttaatgctgcaaatggaactgggcgaaaagcctttgcagatgcaaattatcgtgttgcagggaaatctggcactgcacaagtgtttagtttaaaggaaaatgaaaaatataatacggcaggcttaaaaaaagaattgcatgatcacgcttggtttaccgcttatgccccttatgataatcctaaattagttgtaacagtgattttagaaaatgcgggtggtggttcaagtaatgccgcaccgttagcgcgtaaagtgatggattactatttaaatcagcgtttaccacaagttgaaaaatataatgcaaccattcagcaaaaagaagatttaccacaagagagcgagcaaataaatggaagataa

SEQ ID NO: 66 - protein, 618 aa, Haemophilus influenzae
MGILLLTGVLFTNIYQLQIVNFNTYQTRSNGNRIKLLPLPPTRGLIYDRYGKLLAENLTFFGLYIVPEKTENLDRTLDELRYIVGLTDNDIENFKKERRRGTRYTPILLKPNLTEEQISRFAVNGYQYPSLEVRPYFKRHYLYGETMAHILGYVGKMNDKDVERLKREDKFANYAGTNDIGKLGIERYYEDILQGTTGFEEVEINNRGKVIRTLRSRPAVAGKSIHLTIDLALQRYITELLSGLKGAVVVLDPKDSSVLAMVSTPSYDNNLFVDGISSEDYKRLLNDPARPLYSRATQGAYPPASTVKPFIAVAAQTENVITPNTTIFDPGYWVLPNSTKRFRDWKKTGHGDTDLDKAITESSDTYFYQVAYNMGIDRLSNWMKDFGFGMPTGIEIQEETAANIPTREWKQKRYKRPWVQGDTISVGIGQGYWTATPLQVAKATTILVNNGKVNTPHLMKAIEGAVLEPYEDPLLYPDINTPKVAAWEAAKRGMYNVVNAANGTGRKAFADANYRVAGKSGTAQVFSLKENEKYNTAGLKKELHDHAWFTAYAPYDNPKLVVTVILENAGGGSSNAAPLARKVMDYYLNQRLPQVEKYNATIQQKEDLPQESEQINGR

SEQ ID NO: 67 - DNA, 435 bp, Haemophilus influenzae
atgccttcttgggttacaacgggttttgaggaatatcaacgccgtttcccaaaagatatgccttttgaactgattgaaatcccagcaggtaagcgtggaaaaaatgctgatattaaacgtattttagagcaagaaggtaaggcgatgttagctgcctgtggaaaaggcaaagtcgtgacgttagatattcctggtaaaccttggacgacaccgcagttagccgagcaattagaagcgtggaaaaatgatggtcgcgatgtttgtttgttgattggtgggcctgaggggctttcgccagaatgtaaagccgctgcagagcaaagttggtcgctttcgccattgacattacctcatccacttgttcgtgttgtagtggctgaaagtttgtatcgcgcgtggtcgctcactactaatcatccttatcatcgagaataa

SEQ ID NO: 68 - protein, 144 aa, Haemophilus influenzae
MPSWVTTGFEEYQRRFPKDMPFELIEIPAGKRGKNADIKRILEQEGKAMLAACGKGKVVTLDIPGKPWTTPQLAEQLEAWKNDGRDVCLLIGGPEGLSPECKAAAEQSWSLSPLTLPHPLVRVVVAESLYRAWSLTTNHPYHRE

SEQ ID NO: 69 - DNA, 309 bp, Haemophilus influenzae
atggcgttagttgaatttttgatggaaaccttagaagggttaaagggaacagatattgtacattttgatgtacgtggaaaatcatcgattacggataatatgattatttgcacgggtacatcgagccgccaagtttctgcaatggcagataatttaatcacagaatgtaaaaaagcaggttttgaaacctttggcgaagaaggtaaaaatactgcagattggattgtggtggatcttggtcaagctatcgtacatattatgcaacgtgatgcgcgtgaaatgtatcaattagagaaactttgggcgtaa

SEQ ID NO: 70 - protein, 102 aa, Haemophilus influenzae
MALVEFLMETLEGLKGTDIVHFDVRGKSSITDNMIICTGTSSRQVSAMADNLITECKKAGFETFGEEGKNTADWIVVDLGQAIVHIMQRDAREMYQLEKLWA

SEQ ID NO: 71 - DNA, 1656 bp, Haemophilus influenzae
atgagtgatattgcgatcacgattagccttcttgccctcgtcgccgtaatcggcttatggatcgggcattggaagatccgtggggttgggcttggcattggtggcgtgctgtttggtggcattattgttgcccatttcactaatcaatatggcttgaaactggatgcccatacgctgcattttgtgcaagaatttggtttaattttatttgtttatactattggtattcaggttgggccgggctttttttcttctttacgaaaatctggtttaaagctaaatgcctttgccattttgattattgtgctgggttcaattgccgtggttcttgtacgtaaaattgcggatgttccacttgatattgccttaggtatttattctggtgctgttactaatacgcctgcgttgggggctggacaacaaattttagcagaattaggtgtgccgcaaaccactgtaactatggggatgtcttatgcaatggcttatccattcggtatttgcggtattttgcttgcaatgtggttaatccgcttgttttttaaagtcaaagtggatgatgaagcggcacgttttaatgcggagagcagtcaagataaagaaagtttacataatatttctttaaaagtgacgaaccaaaatttagatggtctgacgttaattcaaattcctggatttagtgatgaagaagtcgtatgttcacgtttaaaacgcgatgatatggaaattgttccaaaggcaagtactgaaattcgtatcaacgatattttgcaattagtgggcgatgataattcgcttgccaaaatgcgtttaattatcggacacgaagttgatgcaccaactgttgcctatagtggcgaaattcgttctgagcgtgtggtggtaacgaatgaaaaagtattaggcaaaaagatccgtgccttaggcattcatcaaaaatatggggttgtgatttcacgtttaaatcgtgcagggattgagttagttccaacgggaaataccacactgcaatttggcgatgtgttacatatggtcggacgcagtgatgtactaaatcaggctatttcagtcattggtaatgcacaacaaaaattgcttcaagtgcaaatgttacctgtgtttatcggcattggtttaggggtactcgttggttcgattccattctacattccaggtttccctgttgcgttaaaattagggcttgctggtgggccattggtggttgcgttgatcttagcgagaattggcacgattggtaaactttactggtttatgccgcctagtgctaacttggcgttacgcgaaattgggattgttcttttcttggctgtggtcggtttaaaatcaggcggaagtttctttgataccttgttgaatggctctggtcttgaatggatgggatacggtatttttatcacctttattccattaatgattactggtattttggctcgtctatatggcaaactgaattaccttacaatctgtggtttacttgcaggttcaatgacggatcctcccgctttagcatttgctaatgaaattaaagaagataacggtgctgcagcactttcttatgccactgtgtatccgttagtgatgttcttgcgaataatgtcgccacagttattggcagtgttattatgggcagcatag

SEQ ID NO: 72 - protein, 551 aa, Haemophilus influenzae
MSDIAITISLLALVAVIGLWIGHWKIRGVGLGIGGVLFGGIIVAHFTNQYGLKLDAHTLHFVQEFGLILFVYTIGIQVGPGFFSSLRKSGLKLNAFAILIIVLGSIAVVLVRKIADVPLDIALGIYSGAVTNTPALGAGQQILAELGVPQTTVTMGMSYAMAYPFGICGILLAMWLIRLFFKVKVDDEAARFNAESSQDKESLHNISLKVTNQNLDGLTLIQIPGFSDEEVVCSRLKRDDMEIVPKASTEIRINDILQLVGDDNSLAKMRLIIGHEVDAPTVAYSGEIRSERVVVTNEKVLGKKIRALGIHQKYGVVISRLNRAGIELVPTGNTTLQFGDVLHMVGRSDVLNQAISVIGNAQQKLLQVQMLPVFIGIGLGVLVGSIPFYIPGFPVALKLGLAGGPLVVALILARIGTIGKLYWFMPPSANLALREIGIVLFLAVVGLKSGGSFFDTLLNGSGLEWMGYGIFITFIPLMITGILARLYGKLNYLTICGLLAGSMTDPPALAFANEIKEDNGAAALSYATVYPLVMFLRIMSPQLLAVLLWAA

SEQ ID NO: 73 - DNA, 1779 bp, Haemophilus influenzae
atggattacagccaagaagccattacttctcttatttggattttacaaacgctagccatcacctcagtcgtctttagttttggcatttttcttttggtgcgttttactcaatggggaagacaattttggatgtttgcaggtggttatctttctcctaaacgtagtataaaacctatcttattctttcttctcattgttgcaatgacgctacttagcgtacgtatcagccttgtacattctgagtggtacaaaaatatgtacacatcattacaagaatttaatgaacatgtattttggcaacaaatgggcttgttctgtgtcattgccgcaagttctgtttcagcagcattagtaagctattatttagagcaacgtttcgtcatcaactggattgaatggcttaacgaacagcttgttgataaatggatggcacatcgtgcctattacaaaacacaatatttatcagaaaatcttgataaccccgatcaacgtattcaacaagatgtgcaatcttatgtaaaaaccacgctttctttaagcactggtgtcattgatgcggtaacctctatgatctcttatacgattttattatggggattagcaggtccaatgatggtacttggcgtggaaattccgcatatgatggtatttttagtgtttggttatgtcatcttcacaaccctcatcgcattttggctcggtcgtccattaatatccttgaattttattaatgaacgcctaaacgcaaactatcgttattctttaattcgaataaaagaatatgccgaaagcattgctttttatgcgggcgaaaaagtcgaaaaaaatcagctttatcagcagttcaatgccgtcattcataatatgtggattattgtatttagaacactaaaattttcaggatttaacttagtcgtaagccaaatttccgtggtttttccattgttaattcaagttggacgttactttgaaaaacaaataaaacttggcgatctaatgcaaaccttacaagtatttggtcagttacacgcaaatctttccttcttccgcaatacttatgataattttgcaagctataaagcaacgctcgatcgtttaactgggttcagttatgccattgaaaaagtaaataataaatcacaaacacagatccacaatcatccaacagatgtgattttcaaaaatttaagtattcaaaatccattaggtcatacactaattaaacatctaaacattaccttaccgcaaggaacaagtttacttattcaaggaaaatctggggcaggaaaaaccacgcttttacgcaccattgcggggctttggagctacgcagagggggaaataaattgccctacgcacagtcagcttttcttgtcacaaaagccgtatgtgccacaaggaaatttaatgttagcattagcttatccaaataacgctgacaatatttcacatacgcaagcgatagaaatattaaataaagtgcaactagggcatttaactgaacaattagaaaaagaacaagactggacacgtattctttctcttggcgaacaacaacgtttggcgtttgcacgattaattctacacaaaccaacggtggcatttttagatgaagccacagcaagtatggatgaaggattagaatttgcgatgtatcaattgttacaacaagaactaccacaaacgacgatcatcagtgtgggacaccgttcaaccctaaaaaccttacatcaacaacaattaattctgcaagacaaagggcaatggcaagtgctataa

SEQ ID NO: 74 - protein, 592 aa, Haemophilus influenzae
MDYSQEAITSLIWILQTLAITSVVFSFGIFLLVRFTQWGRQFWMFAGGYLSPKRSIKPILFFLLIVAMTLLSVRISLVHSEWYKNMYTSLQEFNEHVFWQQMGLFCVIAASSVSAALVSYYLEQRFVINWIEWLNEQLVDKWMAHRAYYKTQYLSENLDNPDQRIQQDVQSYVKTTLSLSTGVIDAVTSMISYTILLWGLAGPMMVLGVEIPHMMVFLVFGYVIFTTLIAFWLGRPLISLNFINERLNANYRYSLIRIKEYAESIAFYAGEKVEKNQLYQQFNAVIHNMWIIVFRTLKFSGFNLVVSQISVVFPLLIQVGRYFEKQIKLGDLMQTLQVFGQLHANLSFFRNTYDNFASYKATLDRLTGFSYAIEKVNNKSQTQIHNHPTDVIFKNLSIQNPLGHTLIKHLNITLPQGTSLLIQGKSGAGKTTLLRTIAGLWSYAEGEINCPTHSQLFLSQKPYVPQGNLMLALAYPNNADNISHTQAIEILNKVQLGHLTEQLEKEQDWTRILSLGEQQRLAFARLILHKPTVAFLDEATASMDEGLEFAMYQLLQQELPQTTIISVGHRSTLKTLHQQQLILQDKGQWQVL

SEQ ID NO: 75 - DNA, 1056 bp, Haemophilus influenzae
atgttatttaaaaaaattcgtgggttgttttcaaacgatctttctattgatttaggcacagctaatactttaatttatgtcaaaagacagggtattgtacttgatgaaccctctgttgttgcgattcgtcaagatcgcgtaggcacattaaaaagcattgcagctgtgggtaaagaagccaaattaatgttaggtcgtactccaaaaagtattgtcgcaattcgtccgatgaaagatggcgttattgcagacttttttgtgacagaaaaaatgttgcaatactttatcaaacaagttcatagcggtaattttatgcgtccaagcccacgtgtattagtatgtgtgccagctggtgcaacacaagtagaacgtcgtgcaattaaagaatcagcaatcggtgctggcgcgcgagaagtatatttaattgaagagccaatggcagcggcaattggggctaaattacccgtttctaccgccgttggctcaatggtaattgacatcggtggtggtacgacagaagtggctgtaatttccttaaatggaatcgtgtattcttcttcggttcgtatcggtggtgaccgttttgatgaagcaattatttcttatgttcgccgcacttttggctcggttatcggagaacctacagccgaacgcatcaaacaagaaattggttctgcttatattcaagaaggtgacgaaattaaagaaatggaagtacacggacataatttagccgaaggtgcaccacgttcatttactttaacatcacgtgatgttctagaagctattcaacaaccattaaacggtattgtggcagctgttcgaaccgcgcttgaggaatgccaaccagaacacgcagcagacattttcgaacgaggtatggtcttaactggcggcggtgctttattacgtaatattgatattttactttctaaagaatctggtgtccctgttatcatcgcagaagatccattaacctgtgttgctcgtggtggtggcgaagcattagaaatgatcgatatgcacggcggcgatatttttagtgatgaaatttaa

SEQ ID NO: 76 - protein, 351 aa, Haemophilus influenzae
MLFKKIRGLFSNDLSIDLGTANTLIYVKRQGIVLDEPSVVAIRQDRVGTLKSIAAVGKEAKLMLGRTPKSIVAIRPMKDGVIADFFVTEKMLQYFIKQVHSGNFMRPSPRVLVCVPAGATQVERRAIKESAIGAGAREVYLIEEPMAAAIGAKLPVSTAVGSMVIDIGGGTTEVAVISLNGIVYSSSVRIGGDRFDEAIISYVRRTFGSVIGEPTAERIKQEIGSAYIQEGDEIKEMEVHGHNLAEGAPRSFTLTSRDVLEAIQQPLNGIVAAVRTALEECQPEHAADIFERGMVLTGGGALLRNIDILLSKESGVPVIIAEDPLTCVARGGGEALEMIDMHGGDIFSDEI

SEQ ID NO: 77 - DNA, 1056 bp, Haemophilus influenzae
atgaaacccatttttagcaaagcccctcccctaggcattcgtttacttatcgctatctttgcatctattgccctaattttagctgatggacgtaataactcaataacgaaagcacgtagtgcaatggaaacggcaataggcggtttatattatcttgcaaatagtcctcgaagcatcttagatggtgtttcagaaaatcttgttgataccaataaattacaaattgaaaacaaagtactacgccaacagcttttggaaaaaaatgcagatttacttttacttgatcaactcaaagtcgaaaatcagcgattacgtcttttattaaattctccgttaagaactgatgaatacaaaaaaattgccgaagttcttactgcagaaacagatatttatcgccaacaaattgtgattaatcaaggggaaaaagacggtgcttatgtaggtcagcctatcattgatgaaaaaggcgtcattggacaaattatttccgtgggcgaaaatactagccgagtactgctactcacagacgtaacacattcaattccagtgcaagttctacgcaatgatgttcgtgtcattgcaagtgggactgggcataccgatgaactaagcctcgataacgtgcctcgttctgtggatatcgaaaaaggcgacttactcgtaacctctgggcttggcggacgttttcttgaaggctatcccgtagctgttgtacaaagcgtttcgcgtgatagctctaattactttgcaatagttaaagctaaacctttagctttattagaacgtttacgttacgtacttttactttggccaagtaacctagatatatcaaaagtaaaatcaatatcgccagaagaagttcgcaatctggtgcaaaaacgtttagaaagccaagctaatgaagcaaattatagagtgaaaaaaacacccttaacagaagaagactttccagaaaataaagaaaaaaccattattgaaccagatattccaacagatttccttcaaaatgaagaagatcttcccatagaacagcaagaagaaaggatagaagactaa

SEQ ID NO: 78 - protein, 351 aa, Haemophilus influenzae
MKPIFSKAPPLGIRLLIAIFASIALILADGRNNSITKARSAMETAIGGLYYLANSPRSILDGVSENLVDTNKLQIENKVLRQQLLEKNADLLLLDQLKVENQRLRLLLNSPLRTDEYKKIAEVLTAETDIYRQQIVINQGEKDGAYVGQPIIDEKGVIGQIISVGENTSRVLLLTDVTHSIPVQVLRNDVRVIASGTGHTDELSLDNVPRSVDIEKGDLLVTSGLGGRFLEGYPVAVVQSVSRDSSNYFAIVKAKPLALLERLRYVLLLWPSNLDISKVKSISPEEVRNLVQKRLESQANEANYRVKKTPLTEEDFPENKEKTIIEPDIPTDFLQNEEDLPIEQQEERIED

SEQ ID NO: 79 - DNA, 489 bp, Haemophilus influenzae
atgcaaacacgatttattttacaatggttcactattttaagcttctttgttattgcctttgtattagaacttgcaccttggccagttggtttccaaatgctaaagcctgcgtggcttgtacttgtattactttattggatattagcaattcccaataaagtgagtataggctggtcatttttactcggattaacttgggatttagtattaggctctacattaggcgttcacgctctcgtactttctacgagtatgtatatcattgccaaaaactatttaattctgcgaaatttatcactttggttccaaagtttattggttgtacttttcgtcttcattataagattacttattttcttagttgaattttcactccatactgctttttttcattggcaagccatcttgggcgcattcgcttctggtttactatggccgtgggtatttttattaatgcgaaaaatacgcagaaaagttaaattacattaa

SEQ ID NO: 80 - protein, 162 aa, Haemophilus influenzae
MQTRFILQWFTILSFFVIAFVLELAPWPVGFQMLKPAWLVLVLLYWILAIPNKVSIGWSFLLGLTWDLVLGSTLGVHALVLSTSMYIIAKNYLILRNLSLWFQSLLVVLFVFIIRLLIFLVEFSLHTAFFHWQAILGAFASGLLWPWVFLLMRKIRRKVKLH

SEQ ID NO: 81 - DNA, 777 bp, Haemophilus influenzae
atggatatggcaaattggcagaattatcgttctaccgtgaacggtatgcctgccgtgtttaccgcaaatattgaagatgttgaaaaatatcacggtaaaggtctcgataaaatagtgcagtttactattgattatcaggctgatgatgaaactggtttaccctcagaagttgaatacgataagttaattaaccgtgtatttaaaattttgacacaactcaccgcacttccaaatgtattttttgcggggcattttatttgtaattctcaaataaaaatacatttttattgtaagcacgaaaatcttattgtagaaactttacaacaaattgattttgttaaagatattaatgttcaaaaggatttaatttgggatacttattttgactttttgcttgcttctccattagagattaagttaaatgcaacggaagaattgcttgatttattaaaaagtaaaggtcgtaatttaagtgatacctatttagtagagcatagttttcattttgatgaagagcagaaaatgttcccttttatggatgaactgagtttaggggattattctttcacaacattacaatattctgcacaagcgattcagtttaatgaagatgacgaaccttatttcttggtaaaattagagcaagaaatttcattagaaaatagcgaaatttttgagcaagtagaacgttttgaaaaattggctgaacaattttcgggagagtatatgggttgggaatgtgattctttaatggatgcgaacaagcagttgaattag

SEQ ID NO: 82 - protein, 258 aa, Haemophilus influenzae
MDMANWQNYRSTVNGMPAVFTANIEDVEKYHGKGLDKIVQFTIDYQADDETGLPSEVEYDKLINRVFKILTQLTALPNVFFAGHFICNSQIKIHFYCKHENLIVETLQQIDFVKDINVQKDLIWDTYFDFLLASPLEIKLNATEELLDLLKSKGRNLSDTYLVEHSFHFDEEQKMFPFMDELSLGDYSFTTLQYSAQAIQFNEDDEPYFLVKLEQEISLENSEIFEQVERFEKLAEQFSGEYMGWECDSLMDANKQLN

SEQ ID NO: 83 - DNA, 804 bp, Haemophilus influenzae
atgaaatttatctcttttaatataaatggtttacgtgctagaccacatcaacttgaagccattattgaaaaatatcagccagatgttatcggcttgcaggaaattaaagttgctgatgaggcttttccttatgaaattacagaaaacttaggttatcacgtatttcatcacggacagaaaggtcattatggtgtggcattattgactaaacaagaacctaaagcggttcgttgcggttttccaacagacaatgaagatgcgcaaaaacgcattattatggctgatcttgaaactgaatttggcttattgactgtcattaatggctatttccctcaaggggaaagtcgtacgcacgagactaaatttccagctaaagagaaattttatgcagatcttcaacagtatttagaaaaagaacacgataaatctaatccgattttaattatgggcgatatgaatattagcccgagtgatttagatattggtatcggcgatgaaaatcgtaaacgttggttacgcacaggtaaatgttctttcttaccagaagaacgagcgtggtatcaacgtttgtatgattacggattagaagatagtttccgtaagctaaatccaacagcaaatgataaattctcgtggtttgattaccgttctaaaggttttgatgataatcgaggtttacgaattgatcatattttagtaagccaaaaattggctgaacgatgtgtcgatgtgggcattgcattagatattcgagcaatggaaaaaccgtctgatcacgcaccgatttgggctgaatttaaatag

SEQ ID NO: 84 - protein, 267 aa, Haemophilus influenzae
MKFISFNINGLRARPHQLEAIIEKYQPDVIGLQEIKVADEAFPYEITENLGYHVFHHGQKGHYGVALLTKQEPKAVRCGFPTDNEDAQKRIIMADLETEFGLLTVINGYFPQGESRTHETKFPAKEKFYADLQQYLEKEHDKSNPILIMGDMNISPSDLDIGIGDENRKRWLRTGKCSFLPEERAWYQRLYDYGLEDSFRKLNPTANDKFSWFDYRSKGFDDNRGLRIDHILVSQKLAERCVDVGIALDIRAMEKPSDHAPIWAEFK

SEQ ID NO: 85 - DNA, 675 bp, Haemophilus influenzae
atggaaatcgaggttgtttatcaacatagcgattttattattatcaacaagtctgagggtattagcgttcataaagatcaagaagaacaaggcttaacagaacttgttgcaaaacaactgaatgtgcctaaagtatggttggttcatcgcttagataaagtaacttctggtttgttaattctggcgttaaatgctgaaagtgcggctgaattttcacgacttttttctgaacataaaattcataaaacttatttggcattaagtaaccaaaagcctaaaaagaaacaaggtttgattatcggggatatgaagaaagctcgagaaggcgcatggaaactttgtcaaaccaaagaaaatccagcaattacgcgttttgaaagtgtaagctgtgaacctaatttacgtttatttattttaaaaccacaaacggggaaaacacatcaattacgtgttgcgatgaaaagtttaggtagcccgattttaggcgatgggctttatggtaaaaacacagaaaaaattgaccgcacttatttgcacgctactcaattggaatttgattatctaaataattttatttcggtcacttgtttaccttctcaaggtcaattttggcttaagcctacagtatttgagcaaattcaggtttatctgacaaagccgtttttatcaaaatag

SEQ ID NO: 86 - protein, 224 aa, Haemophilus influenzae
MEIEVVYQHSDFIIINKSEGISVHKDQEEQGLTELVAKQLNVPKVWLVHRLDKVTSGLLILALNAESAAEFSRLFSEHKIHKTYLALSNQKPKKKQGLIIGDMKKAREGAWKLCQTKENPAITRFESVSCEPNLRLFILKPQTGKTHQLRVAMKSLGSPILGDGLYGKNTEKIDRTYLHATQLEFDYLNNFISVTCLPSQGQFWLKPTVFEQIQVYLTKPFLSK

SEQ ID NO: 87 - DNA, 990 bp, Haemophilus influenzae
atggaagcaaagctagatgaagcgttggacggagagttacttgatgctcaacttgaacaagcattgaaaccaaaatccagttttagaaaaactttattaaaatttaccgcacttttatttggcttggcgacggttgcgcaatccgtgcagtggatttgggatagctatcaacaacatcaatggatttatcttgcttttgctttagtcagtttgattatcattttattgggtattaaagagattatttgtgagtggcgacgtttagttcgtttaaaaaaacgtgagcaattacaacaacaaagtcagcagatttggttagaaagtgcggtaaaaaatggcgatgttttttcctttcataacgcagaaaaaagtaaaattctttgcttagatattgcaaaatctttaggtttggaaaatgattctccagcggtaattcaatggcaacaccaattaaatgaagcttattcggcgcaagaaattgctcatttattcagtcgtcatgttttgtcttcttttgatgcacaagctaaaaaattgattagtaaaatggcagctgaatcagctgtgattgtcgcgattagtccacttgctgtagtggatatgttttttatcgcgtggcgcaatcttcgattaatgaataagattgctgaaatttatgggattgaattagggtatttttcacgtattagattgttaagaatggtattggtcaatatcgcttttgctggagcaaccgaagtggcacaagatattggaatggattggctttctcaagatgtgacagcaaaattatctacacgtattgctcaaggaattggtgtgggattactcactgctagattaggcgtgaaagcaatggaactttgtcgtccgttagcatttcaattaaacgaaaaaccaaaactctcacatattcaacaggaattacttagttcggtaaaagatattgttctcggtaaaaataaaatttacaaaaaggagcaaatctga

SEQ ID NO: 88 - protein, 329 aa, Haemophilus influenzae
MEAKLDEALDGELLDAQLEQALKPKSSFRKTLLKFTALLFGLATVAQSVQWIWDSYQQHQWIYLAFALVSLIIILLGIKEIICEWRRLVRLKKREQLQQQSQQIWLESAVKNGDVFSFHNAEKSKILCLDIAKSLGLENDSPAVIQWQHQLNEAYSAQEIAHLFSRHVLSSFDAQAKKLISKMAAESAVIVAISPLAVVDMFFIAWRNLRLMNKIAEIYGIELGYFSRIRLLRMVLVNIAFAGATEVAQDIGMDWLSQDVTAKLSTRIAQGIGVGLLTARLGVKAMELCRPLAFQLNEKPKLSHIQQELLSSVKDIVLGKNKIYKKEQI

SEQ ID NO: 89 - DNA, 426 bp, Haemophilus influenzae
  misc_feature 408, 409, 410, 411, 412: n is any nucleotide
atgcaatcacgtcttattgtggatgctcaaaaagaatcgttactcagcacacataaagtgttgcgtaacacatattttttactgggattaacaatggctttttcagcggttgttgcgtttatttcaatgagcttaaacttgccctatccaaatattattgtgttactagtgggtttttatggcttacttttcttaaccaataaattagctgatcgccctgctggtattttggctgcctttgcgttcactggatttatgggatacaccatcgggccaattttaaatatgtatgtggcacgtggaatggaagatttgattatgcttgcattcgcaggaacggctatcgtattttttgcgtgttccggcttatgtattgactacgaaaaaagatatgtcatttatcaagcnnnnncattcattcattaa

SEQ ID NO: 90 - protein, 141 aa, Haemophilus influenzae
  VARIANT 137, 138: Xaa is any amino acid
MQSRLIVDAQKESLLSTHKVLRNTYFLLGLTMAFSAVVAFISMSLNLPYPNIIVLLVGFYGLLFLTNKLADRPAGILAAFAFTGFMGYTIGPILNMYVARGMEDLIMLAFAGTAIVFFACSGLCIDYEKRYVIYQAXXFIH

SEQ ID NO: 91 - DNA, 555 bp, Haemophilus influenzae
atgaaaaaacaaattcttgccttagtttgtggcgtaatgtttagtagttcgacttgggcgcacaatttgcaattagaacaatctttaccatcggtcaaagtgagtgagtatggtgaaattgtactttctggaaaagataccgcatttcaaccttggggttctgcggaattagcgggcaaagtgcgtgttgttcatcatttagcgggtagaacggctgcaaaagagaaaaatcagtcgatgattgatgcgataaaagcatcccattttaatcctgtaaaataccaaacaaccactattattaatgcggatgatgcgattgttggtacaggtatgtttgtaaaaaatggtgcgaaaaaaggcaaacaggaaaatccacatagccaagttgtgttagatgataaaagtgcggtaaaaaatgcttggggattaaattctaaagatagtgcaattatcgtgttagacaaaacgggaaaagtaaaatttgtgaaagaaggaaaattgtctgatagcgatattcaggctgttatttcactggtaaatggattgaccaaataa

SEQ ID NO: 92 - protein, 184 aa, Haemophilus influenzae
MKKQILALVCGVMFSSSTWAHNLQLEQSLPSVKVSEYGEIVLSGKDTAFQPWGSAELAGKVRVVHHLAGRTAAKEKNQSMIDAIKASHFNPVKYQTTTIINADDAIVGTGMFVKNGAKKGKQENPHSQVVLDDKSAVKNAWGLNSKDSAIIVLDKTGKVKFVKEGKLSDSDIQAVISLVNGLTK

SEQ ID NO: 93 - DNA, 189 bp, Haemophilus influenzae
ttgcttgcagaaggcgacaatgtacttttgattaaagatttaaaattaaaaggttcatcagaagtattgaaaaaaggtacaaaattcaaaaacatccgcttagtaaatggcgatcataatgtcgattgcggcaaaatcatgttgaaatctgagtttttgaaaagcttaattgaaaaaaatgcagtctaa

SEQ ID NO: 94 - protein, 62 aa, Haemophilus influenzae
MLAEGDNVLLIKDLKLKGSSEVLKKGTKFKNIRLVNGDHNVDCGKIMLKSEFLKSLIEKNAV

SEQ ID NO: 95 - DNA, 471 bp, Haemophilus influenzae
acaaaatacctccttctaaaacggaaagaagactgcttacgtttgataattttacagctggaagcggaggtagcttatttaaaaaaggggggggggggagaatactccgactttaggatgaaatcgaacaacggaaattatccaaacgccaaaggattaaacaaagcttgcggtgtcattttacattcagaccagggatggcaatatcaaatggtagcttatcgtcgaatcttggctgaacatggcattattcaaagtatgtcgagaaaagggaattgcttggacaacgctgcgatggaaagtttctttgggcgattaaaaacggaatgtttttatgatcgggaatttaactgtagagaggagatagttgatgccgtcagggattatttggattactataatcaccgacggattcaactaaaattaaaaggactgagtccgatacaatatcgaaaacaatcctttaaataa

SEQ ID NO: 96 - protein, 156 aa, Haemophilus influenzae
TKYLLLKRKEDCLRLIILQLEAEVAYLKKGGGGEYSDFRMKSNNGNYPNAKGLNKACGVILHSDQGWQYQMVAYRRILAEHGIIQSMSRKGNCLDNAAMESFFGRLKTECFYDREFNCREEIVDAVRDYLDYYNHRRIQLKLKGLSPIQYRKQSFK

SEQ ID NO: 97 - DNA, 2289 bp, Haemophilus influenzae
atgaaattacaacgatgggttaaacaatatcaactaggtttactttttcagcaaggtcaatttggtttagaaaaggaaagtcaacgtattgacgataaggggaatattgtgacgaccccccatccacgagtatttggtaaccgttcttatcatccctatattcaaacagattttgccgagagtcagcttgagttgattacgccaccaaatgctaaactggaagatagcctacgttggctttctgcaattcatgaggtggtgcagcgttctttacctgaaaatgaatacattttcccatttagtatgcctgcaggattaccaccagaaaatgagattcaagaggctcagcttgataaacaggaagatgttgaatatcgcgagcatctgtctaaacaatatggaaaatacaagcaaatggtaagtggaattcactacaatttccaactgtcatctgaatttgtgaaagctgtattcctgttccaagatgaatatgttcatcttaaagattttcagaatgctttatatatgaaattggctaataattttctacgatatcagtggattttagtttatttacttgcagcaagtccgacagtggaagccaattatttttctcgaaatagcgtactgaattttcctttgaaagaggggcagttagtacgtagtttacgttctagttcctatggttacgttaattcatctaatgttgtagtgaatcatgataaccttgaaaattatgtagaaacattagagtttcaagttaaatctggccatttgattgcagaaaaagaattttattctaatgttcgtttacgaggttcgaaaaaagcccgtgaattgctagaaaaaggcgttcaatatgcagaatttcgtttgtttgatttgaatccacttgagccatatggtatcagtctagatgatgcaaaatttattcatactttcttattaggaatgttatggcttgatgagacaagtggtcaaaaagaagtagagcttggtaaacaaagattatatcaagtatcccttgaggatcctcgtgagcaaacagcatttcgagaagagggggaagcaatattgcgccaaattgttgatatgttgaaaattatcaatgcagatgaaagagcggttaaaatttcggaagaaaaattggtgcaattggcagagccaagcctaacagtaaatggaaaattgcttaaagcgattgagcaggagggaagttataaagccttgggggtaaaacttgcgaagctatataaagctcaagcttttaaacgtttttacgctttatctgcatttgataatatggagctttctactcaagctttattatttgatttaattcaaaaaggtgttacaactgaaattttagatgagaatgatcaatttcttgcacttaaatttgatgaacgccttgaatatgttaaaaatggtaatatgactagtcacgatcaatatatctcaccattgattatggaaaataaagtagtgacaaagaaagtattatcaaaggctggttttaatgtaccaaaaagcttggaatttacatcgattgaacaagctgttgcacattatgctttatttgaagggcgcgctgtcgttattaagccaaaatccacaaattatggtttaggcatcacaattttcaaacagggtgtgacacatagagatgattttgtcaaagcgattgagattgcttttcgcgaagataaagaagtgatggttgaagattatttagttggtacagaatatcgcttctttgttttgggggatgaaacgcttgcagtgttgttgcgtgtacctgcaaatgttattggtgatggaaagaacacggtgcgtgaattggtcgagataaaaaattcagatcctttacggggagatggttctcgttcacctctcaaaaagatcgctttaggtgacatagaattattacagttaaaagaacaaggattagcacctgatagtgtacctcaggctggtcaaattgtgcagttacgtgctaattctaatatcagtacaggtggtgattctattgatatgactgataaaatgcatgagagttataaacagattgctgtaggggttgctcgtgcgatgggggctaaagtttgcggggtcgatttaattattcctgatttaacaaaacaagctgaaccattcttaaattcctggggagtaattgaagctaattttaatccaatgatgatgatgcatatttttccttatcaaggtaaatcaagaagattgactaagaacgtcattaaaatgttgtttccaaatatagaaatgtag

SEQ ID NO: 98 - protein, 762 aa, Haemophilus influenzae
MKLQRWVKQYQLGLLFQQGQFGLEKESQRIDDKGNIVTTPHPRVFGNRSYHPYIQTDFAESQLELITPPNAKLEDSLRWLSAIHEVVQRSLPENEYIFPFSMPAGLPPENEIQEAQLDKQEDVEYREHLSKQYGKYKQMVSGIHYNFQLSSEFVKAVFLFQDEYVHLKDFQNALYMKLANNFLRYQWILVYLLAASPTVEANYFSRNSVLNFPLKEGQLVRSLRSSSYGYVNSSNVVVNHDNLENYVETLEFQVKSGHLIAEKEFYSNVRLRGSKKARELLEKGVQYAEFRLFDLNPLEPYGISLDDAKFIHTFLLGMLWLDETSGQKEVELGKQRLYQVSLEDPREQTAFREEGEAILRQIVDMLKIINADERAVKISEEKLVQLAEPSLTVNGKLLKAIEQEGSYKALGVKLAKLYKAQAFKRFYALSAFDNMELSTQALLFDLIQKGVTTEILDENDQFLALKFDERLEYVKNGNMTSHDQYISPLIMENKVVTKKVLSKAGFNVPKSLEFTSIEQAVAHYALFEGRAVVIKPKSTNYGLGITIFKQGVTHRDDFVKAIEIAFREDKEVMVEDYLVGTEYRFFVLGDETLAVLLRVPANVIGDGKNTVRELVEIKNSDPLRGDGSRSPLKKIALGDIELLQLKEQGLAPDSVPQAGQIVQLRANSNISTGGDSIDMTDKMHESYKQIAVGVARAMGAKVCGVDLIIPDLTKQAEPFLNSWGVIEANFNPMMMMHIFPYQGKSRRLTKNVIKMLFPNIEM

SEQ ID NO: 99 - DNA, 714 bp, Haemophilus influenzae
atgtttgaatggattaccgatcctgaagcgtggatatcacttgcgacacttgctgctttggagatcattttaggggtcgataatattatttttattagtatcctagttgggcgtttacctgaaagccaacgccagtctggtcgtattattggacttggtttagcaatgctgacaagaattttacttttaatgtcacttgcttggatgatgaaacttactgcaccattatttactctgtttaatcaagcaatttctgggcgtgatttgattttattaatcggaggtttattcctgattataaaaagctttggggaaattaaagaggctataaatcatcaagaacaccataattctgaaagcaaaaacaaagtgagttattttggcgtattaattcaaattgcagtgctagatattgttttttctttagattctgtgattacagcagtaggtatggcaagccaccttcctgtgatgattttggcgattattattgccgttggcgtgatgatgtttgcagcaaaaccaatcggcgatttcgtagatacgcatccaaccttgaaaattctcgctttagccttcttagttttagtaggaattagcttaattgcagaaagtttagatattcacatcccgaaaggttacatctattttgcaatgggattctctgttgtggtcgaaatgatcaatattcgaatgagaaaacggattaaatag

SEQ ID NO: 100 - protein, 237 aa, Haemophilus influenzae
MFEWITDPEAWISLATLAALEIILGVDNIIFISILVGRLPESQRQSGRIIGLGLAMLTRILLLMSLAWMMKLTAPLFTLFNQAISGRDLILLIGGLFLIIKSFGEIKEAINHQEHHNSESKNKVSYFGVLIQIAVLDIVFSLDSVITAVGMASHLPVMILAIIIAVGVMMFAAKPIGDFVDTHPTLKILALAFLVLVGISLIAESLDIHIPKGYIYFAMGFSVVVEMINIRMRKRIK

SEQ ID NO: 101 - DNA, 1971 bp, Haemophilus influenzae
ttggctccccttgcttgcggggggagctgccgaaggctgaggggggataaatttaacatcgcaagccccttcagccctttaggctccttccctcgaaaccaggggaaggcaagatgtcttttgttattggtaaaatattctatgttcaattacaaaaaattcctcgctgatgtctctcacgaacctggtgtttatcgtatgtatgacgataaagatcaggttatttatgttgggaaagcaaaggatctaaaaaaacgtctttcaagctattttcgtaaaaatctgagtagtaaaaaaacagaggcgttggtggcatcaattcatcatattgacaccatgctaacttcatctgaaacggaagctttactgctagagcataattttatcaagctttatcagcctcgctataacgtattattgcgtgatgataaatcctatccatttattttattaaccaaagaacgccatccaagaatcacgtcctatcgtgggtctaaaaaatttgcgggtgaatatttcgggccctatcctcacgcaggcgccgtgcgtgaaactttatcgcttttacaaaaacttttccctgttcgacaatgtgaaaattccgtttattccaaccgctctcgtccttgtttacaatatcaaattgggcgttgttctgcgccttgtgtacagggatatgtttccgatgaagaatataatcagcaagttgaattagcccgcttatttttacaaggcaaagatcaactggtgttagattatttaatcgggaaaatggagcaggcaagcagaaatttagattttgaacaggcggctcgttatcgtgatcagattcaggcggtgcgttcggttattgaaaaacaatttgtatccaatgaacgtttagatgatatggatattatgtccatcgcttatcaacacggtttagcctgtgtacaggtgatgtttattcgtcaaggaaaagtgctaggcaatcgcagttatttcccaaaagtccccgccaatacggatttatcggaacttaccgaaacttttgtagggcaattttatttacaaggtcatcaagggcgaagtatcccaaatagtattattgttgatcgtcaattagctgaaaaatcagagcttgagcaacttcttagcaagcaagcgggcagaaaagtgacgattcaagaaagtgtaaaaggcgataagagtaaatacttacagctcgcacaagttaatgctaaagcggctttaaatgtacaacttaaacaatcttcacgaatgtcagagcgttatcaagcgttgtgtgatctgttaaatctccctgaaattaagcgtatggagtgtttcgatataagccacacgatgggaaatcaaacggtagcatcttgtgttgtctttaatcaagaaggcccactgaaatctgattatcgtcgttttaatattgaaggcattactggcggggatgattatgctgcaatggaacaagcgttgcagaaacgttatgagcgtgatttagaagaagataaaattcccgatattatttttattgatggtggaaaagggcaattaaatcgtgcgctgaacgtgttccaacatcttcaagtaaaatgggataaaaatagaccgcacttaattggcgtggcaaaaggtgtggatcgtcgagcagggcaggaagtactgatcatcagcaaacaagaccgcgaaattcatttgcctgatgatagtttggcattgcatttgattcaacacatccgtgatgaaagtcataataacgcaataagcggacaccgtaaaaaacgtcaaaaagcctttacacaaagcggtttagaaactattgaaggtgtgggcgctaaacgtcgtcaggctttactgaaatatcttggtggtttacaaggtgtgaaaaaggcgaccttagatgaaatagcctctgtaccgggaatttcccttaaacttgctgaaacgatttttgaaacgctcaaaaacgattaa

SEQ ID NO: 102 - protein, 656 aa, Haemophilus influenzae
MAPLACGGSCRRLRGDKFNIASPFSPLGSFPRNQGKARCLLLLVKYSMFNYKKFLADVSHEPGVYRMYDDKDQVIYVGKAKDLKKRLSSYFRKNLSSKKTEALVASIHHIDTMLTSSETEALLLEHNFIKLYQPRYNVLLRDDKSYPFILLTKERHPRITSYRGSKKFAGEYFGPYPHAGAVRETLSLLQKLFPVRQCENSVYSNRSRPCLQYQIGRCSAPCVQGYVSDEEYNQQVELARLFLQGKDQLVLDYLIGKMEQASRNLDFEQAARYRDQIQAVRSVIEKQFVSNERLDDMDIMSIAYQHGLACVQVMFIRQGKVLGNRSYFPKVPANTDLSELTETFVGQFYLQGHQGRSIPNSIIVDRQLAEKSELEQLLSKQAGRKVTIQESVKGDKSKYLQLAQVNAKAALNVQLKQSSRMSERYQALCDLLNLPEIKRMECFDISHTMGNQTVASCVVFNQEGPLKSDYRRFNIEGITGGDDYAAMEQALQKRYERDLEEDKIPDIIFIDGGKGQLNRALNVFQHLQVKWDKNRPHLIGVAKGVDRRAGQEVLIISKQDREIHLPDDSLALHLIQHIRDESHNNAISGHRKKRQKAFTQSGLETIEGVGAKRRQALLKYLGGLQGVKKATLDEIASVPGISLKLAETIFETLKND

SEQ ID NO: 103 - DNA, 765 bp, Haemophilus influenzae
atgtcatttaccgtgattatccctgctcgttttgcatcaagtcgtttgcctggaaaaccgcttgctgatattgcgggtaagccaatgattcaacatgtatttgagaaagcactgcagtctggggcgagccgagtgattattgccaccgataatgaaaatgtggctgatgttgctaaaagttttggcacggaagtgtgcatgacttcggttaatcataattctggtacagaacgtttagcggaagttgtagaaaaattagcgattcctgacaatgaaatcattgtcaatattcaaggcgatgagcctttgattcctcccgttatcgtgcgacaagtggcagataatttagcaaaatttaatgtcaatatggcaagtcttgcggtaaaaattcatgatgctgaggaattatttaatccaaatgcagtgaaagttttgacggataaagacggctatgtgctatatttttcccgttcggttattccttacgatcgtgatcagtttatgaatttacaggatgttcagaaagtacagcttgcggacgcttacttacgtcatattggcatttacgcatatcgtgcggggttcataaaacaatatgtgcaatgggctccgactcaacttgaaaatctagaaaaacttgagcagcttcgtgtgttatataacggcgaacgcattcacgtagagcttgcgaaagaagtgcctgcagtaggggtggatactgctgaagatttggaaaaagtgcggctggttttggcgaaggattaa

SEQ ID NO: 104 - protein, 254 aa, Haemophilus influenzae
MSFTVIIPARFASSRLPGKPLADIAGKPMIQHVFEKALQSGASRVIIATDNENVADVAKSFGTEVCMTSVNHNSGTERLAEVVEKLAIPDNEIIVNIQGDEPLIPPVIVRQVADNLAKFNVNMASLAVKIHDAEELFNPNAVKVLTDKDGYVLYFSRSVIPYDRDQFMNLQDVQKVQLADAYLRHIGIYAYRAGFIKQYVQWAPTQLENLEKLEQLRVLYNGERIHVELAKEVPAVGVDTAEDLEKVRLVLAKD

SEQ ID NO: 105 - DNA, 999 bp, Haemophilus influenzae
atgcccttctggtattccaattccaaacttatttggctcttatcgcctttttctttattgttttggttgattagccaacttcgtcgcgccttattttgtttggggataaaatcttcttatcgtgcaccaaaaccagtgataattgtgggaaatttgtctgtgggtggaaatggcaaaacgcccgtggtggtgtggcttgtggaagaattaaaaaaacgaggttttcgcgtaggtgtgatttctcgtggttacggcagtaaatctaaaacttatccgttgtttgttactgaaaatacaaatccaattgaaggtggcgatgaacctgtattgattgctaaacgtactaatgttcctgtcgtgatttccccgaatcgccagcaagcgattgaattactcttaagccaagcagagtgcgatattattgtttctgacgatggtttacagcattatcaattacagcgtgatttagaaattgtcgtaatggacgcagagcgtgcattgggaaatgattttgtattgcctgtaggcccattgcgagaattaccaagtcgattaaaatccgtagattttgtgatcactaatggtggaaaaaatcagtattcagatgcagttatgtatcttgtaccccatttcgcgattaatttaaaaaccaatgaaaaacgccaattaaaggaatttcaatctggtgttgccattgcagggattggcaatccacagcgtttttttactatgttagaaaagttagggattcaattagaacgaactcaagcatttcaagatcatcaacattttgaagtgtctcaattagaaaaacttgctgaaaatcaaccgctctttatgacggaaaaagatgccgtaaaatgccaatcttttgccaacgataattggtggtatgtccctgtggatgcagagattattgaggctgaaaaacaatgtgaaaatttaccgcacttttgggacaaaatagacaaacttgtggcgcaatatagaaatggctga

SEQ ID NO: 106 - protein, 332 aa, Haemophilus influenzae
MPFWYSNSKLIWLLSPFSLLFWLISQLRRALFCLGIKSSYRAPKPVIIVGNLSVGGNGKTPVVVWLVEELKKRGFRVGVISRGYGSKSKTYPLFVTENTNPIEGGDEPVLIAKRTNVPVVISPNRQQAIELLLSQAECDIIVSDDGLQHYQLQRDLEIVVMDAERALGNDFVLPVGPLRELPSRLKSVDFVITNGGKNQYSDAVMYLVPHFAINLKTNEKRQLKEFQSGVAIAGIGNPQRFFTMLEKLGIQLERTQAFQDHQHFEVSQLEKLAENQPLFMTEKDAVKCQSFANDNWWYVPVDAEIIEAEKQCENLPHFWDKIDKLVAQYRNG

SEQ ID NO: 107 - DNA, 1764 bp, Haemophilus influenzae
atgcaagagcaaaaattacaagaaaatgatttttcaaccttacaaacttttaaacgtttgtggccaatgattaaaccttttaaagcggggcttattgcttcaggtattgcgttagtttttaatgcattggctgattcaggcttgatttatttgttaaaaccgttgttggacgatggttttggtaaggcaaaccattcatttttgaaaataatggcttttgttgttgtgggaatgattattttacgtggcgtgactaactttatttctaattattgcttggcgtgggtatcaggcaaagttgtcatgacaatgcgtcgccgcttatttaaacatttaatgtttatgccagtgagtttctttgacagaaattcaacggggaaattactttctcgtatcacttatgattctgagatgattgcaagttcttcttcaggatctttgattaccattgtgcgagaaggagcatatattatttcgctattggcagtgatgttttatacaagctgggaattaacccttgttttatttgttatcgggccaattattgcagtgttgatcactatcgtttcaaaaattttccgtaagttgagtaaaaatttacaagattcaatgggggaattgacggcgacgacggagcaaatgctgaaaggacataaagtcgtgatttcttttggtggtcagtttgtcgaggaagagcgttttaataaagtgagtaacaacatgcgtcgtaaaggtatgaaaatggttactgcagattccatttccgaccctgttgtgcagattattgcttcttttgctttagttgctgtattgtttttagctaccacgccattaattgcggaagataatctaagtgcgggttcttttacggtagttttttcatctatgttggcaatgatgcgcccattaaaatccttaacgaatgtaaactctcaattccaacgtggaatggcagcttgtcaaacgctatttgccattttagatttagaaccagaaaaagataacggcacttataaagcagaacccgcgaaaggcgagttagaatttaaaaatgtgagttttgcatatcagggaaaagaggaacttgcattaaataatatttcttttagcgtgcctgcaggaaaaaccgttgctttagtgggacgttctggatcgggcaaatcaaccattgctaatttagtgacacgtttttacgatattgagcaaggcgaaattttactggatggcgtaaatatccaagattatcgtttatctaatttgcgtgagaactgtgccgtggtttctcaacaagtccatttatttaacgatactattgcgaataatattgcttatgcagcacaagataagtattctcgcgaagaaattattgctgcagcaaaagcggcttatgctttagagtttatcgaaaaattaccgcaaggttttgatacggtaattggcgaaaatggcgcgagcctatctggtgggcaacgccagcgcttagcgattgctcgtgctttattgcgtaattcgccagtattaattttagatgaagccacatctgcactagatacggaatcagaacgcgccattcaatctgcattagatgaattgaagaaagatcgtactgttatcgtaatcgcccatcgtttatcaaccattgaaaatgcggatgaaattcttgtgattgatcacggggaaattagtgagcgaggcaatcatagagcattgcttgaacaaaatggagcttataaacagctatacagtatgcagtttagtggctaa

SEQ ID NO: 108 - protein, 587 aa, Haemophilus influenzae
MQEQKLQENDFSTLQTFKRLWPMIKPFKAGLIASGIALVFNALADSGLIYLLKPLLDDGFGKANHSFLKIMAFVVVGMIILRGVTNFISNYCLAWVSGKVVMTMRRRLFKHLMFMPVSFFDRNSTGKLLSRITYDSEMIASSSSGSLITIVREGAYIISLLAVMFYTSWELTLVLFVIGPIIAVLITIVSKIFRKLSKNLQDSMGELTATTEQMLKGHKVVISFGGQFVEEERFNKVSNNMRRKGMKMVTADSISDPVVQIIASFALVAVLFLATTPLIAEDNLSAGSFTVVFSSMLAMMRPLKSLTNVNSQFQRGMAACQTLFAILDLEPEKDNGTYKAEPAKGELEFKNVSFAYQGKEELALNNISFSVPAGKTVALVGRSGSGKSTIANLVTRFYDIEQGEILLDGVNIQDYRLSNLRENCAVVSQQVHLFNDTIANNIAYAAQDKYSREEIIAAAKAAYALEFIEKLPQGFDTVIGENGASLSGGQRQRLAIARALLRNSPVLILDEATSALDTESERAIQSALDELKKDRTVIVIAHRLSTIENADEILVIDHGEISERGNHRALLEQNGAYKQLYSMQFSG

SEQ ID NO: 109 - DNA, 2367 bp, Haemophilus influenzae
atgaaattaaacttaataactttagctgtcttgttaattgtcgcggatttaacgttgttatttctaccgcaaccgttgctattgccttggcaagttgctctcgttattgcgcttgttttgatttttctttttattttcttgcgtagaaatttcttagttagccttgctttttttgttgcctctcttggctattttcattattcggctttgagtttatcacaacaagctcaaaatattaccgctcaaaagcaagtggtaacttttaagattcaagaaattttgcaccaacaggattatcaaacgcttatcgccacagcaacattggagaataatttgcaagaacaacgaattttcttaaattggaaagcgaaagaggtgcctcaattatcggaaatttggcaagctgaaatttctttacgtcccctttctgcacgattaaatttcggtgggtttgatcggcaacaatggtatttttcaaaaggaattacggctgttggaacggtaaaaagtgcggtgaaaattgcggatgtttcatcattgcgagcagaaaaattgcaacaagtaaagaagcaaacggaaggattatctctacaaggtttattgattgccttagcttttggtgaacgggcttggttagataaaaccacttggtcaatttaccaacaaaccaatactgtgcatcttattgctatttctggcttacatattgggttggctatgggaattggattttgcttggcgcgtgttgtgcaagtcttttgccccacccgttttattcatccttattttcctttagtttttggtgttttatttgctttaatttatgcgtatttggctggttttagtgtgccaacttttcgtgccatttcagcacttgttttcgttttatttattcaaataatgaggcgacattattcgcccattcagctttttacgttggttgtcggattcttgcttttctgcgatccattaatgccgctttcggtcagtttttggctttcttgtggggcggttgggtgtttgatcctctggtatcgttatgtgcctttttctctttttcaatggaaaaatcgccccttttcaccaaaagtgcggtggatttttagtttatttcatttgcaatttgggttattgctcttttttacacctttgcaactttttctatttaatggcttatcgttgagtggatttttagccaatcttatggcggttccaatttatagttttttgcttgtgccattaattttatttgccgtttttactaacggcacaatgttttcttggcaactagcaaacaagttagccgaaggaattactgggttaatttctgtttttcaagggaattggtttaatgtttcatttaatttagcattggttttaaccgcactttgtgcaggaatttttatgttaattatttggagtatttaccgagaacccgagatttcatcatcaaactggcaaataaaacgagcaaaattttttacattgaatctcagtaaacctttactaaaaaatgaacgaatcaacgttttgctatgttctttcggcattattcttatgtgttttatgattttgttgtttaaacaattgagcaaaccaacttggcaggtagatactttagatgtggggcagggcttggcaacgctgattgtgaaaaatggcaaagggattctttatgatacgggttcttcttggcgaggtggaagtatggctgagttggaaattttgccttatttacaaagagaagggattgttttggaaaaattgattttaagccacgacgataacgatcacgcaggtggtgcttcgacaattttaaaggcgtatcccaatgtggaattgattaccccttcacggaaaaactatggggaaaattaccgcactttttgtactgctgggcgtgattggcattggcaagggctgcattttcaaatactttctcctcacaacgttgtgacacgagctgataatccccattcttgtgtgattttagtcgatgatggaaagaatagcgttttgctaactggcgacgctgaagcaaaaaatgagcaaatttttgcccgcactttaggcaaaatcgatgtgttgcaagtggggcatcatgggagtaaaacatcgacaagtgaatacttgctttctcaggttagaccagatgtagcgattatttctagtgggcgttggaatccgtggaaattccctcattattcggttatggaaaggcttcatcgctataaaagtgcggtagaaaataccgctgtttcggggcaagtgcgggtaaatttttttcaagaccgattagaaatccagcaagctcgcacaaaattttccccttggtatgcacgtgtaattggattatcaaaggaataa

SEQ ID NO: 110 - protein, 788 aa, Haemophilus influenzae
MKLNLITLAVLLIVADLTLLFLPQPLLLPWQVALVIALVLIFLFIFLRRNFLVSLAFFVASLGYFHYSALSLSQQAQNITAQKQVVTFKIQEILHQQDYQTLIATATLENNLQEQRIFLNWKAKEVPQLSEIWQAEISLRPLSARLNFGGFDRQQWYFSKGITAVGTVKSAVKIADVSSLRAEKLQQVKKQTEGLSLQGLLIALAFGERAWLDKTTWSIYQQTNTVHLIAISGLHIGLAMGIGFCLARVVQVFCPTRFIHPYFPLVFGVLFALIYAYLAGFSVPTFRAISALVFVLFIQIMRRHYSPIQLFTLVVGFLLFCDPLMPLSVSFWLSCGAVGCLILWYRYVPFSLFQWKNRPFSPKVRWIFSLFHLQFGLLLFFTPLQLFLFNGLSLSGFLANLMAVPIYSFLLVPLILFAVFTNGTMFSWQLANKLAEGITGLISVFQGNWFNVSFNLALVLTALCAGIFMLIIWSIYREPEISSSNWQIKRAKFFTLNLSKPLLKNERINVLLCSFGIILMCFMILLFKQLSKPTWQVDTLDVGQGLATLIVKNGKGILYDTGSSWRGGSMAELEILPYLQREGIVLEKLILSHDDNDHAGGASTILKAYPNVELITPSRKNYGENYRTFCTAGRDWHWQGLHFQILSPHNVVTRADNPHSCVILVDDGKNSVLLTGDAEAKNEQIFARTLGKIDVLQVGHHGSKTSTSEYLLSQVRPDVAIISSGRWNPWKFPHYSVMERLHRYKSAVENTAVSGQVRVNFFQDRLEIQQARTKFSPWYARVIGLSKE

SEQ ID NO: 111 - DNA, 438 bp, Haemophilus influenzae
atgtcaaaagcatcattgagcttgctagatttagcaggcgttaagccttatcaaatgaaaaaagatgaagaatatatgaatgaagagcaaattcttcatttcagaaaaattcttaatgcttggcacgagcaaatcgtggaagaagcttctcgcaccgttgcacatatgcaggatgaagtaaccaatttccccgatcctgcagaccgagcaactcaagaagaggaatttagtctagaattacgtaatcgagatcgcgaacgtaaactaatgaaaaaaatcgaagcaaccttgaagaaacttgataccgatgattttggttactgcgattgttgtggtgaagaaatcggcattcgccgtttagaagcgcgcccaacagcagatctttgcattgattgcaaaactttagctgaaatccgcgaaaaacaagtcgctggttaa

SEQ ID NO: 112 - protein, 145 aa, Haemophilus influenzae
MSKASLSLLDLAGVKPYQMKKDEEYMNEEQILHFRKILNAWHEQIVEEASRTVAHMQDEVTNFPDPADRATQEEEFSLELRNRDRERKLMKKIEATLKKLDTDDFGYCDCCGEEIGIRRLEARPTADLCIDCKTLAEIREKQVAG

SEQ ID NO: 113 - DNA, 1443 bp, Haemophilus influenzae
ttgtttggcaagaagacaaaaaaatcaaaagaggttgccaaaacaagtgctcattctaaacgagttgagcgttctaatagccaaatgccaaaagcgcgagcaaaaaaatcagaacaaacacgtcgctatgataaaaatgtgattaaagcggctcaatttgatatttctccgcgtgattttagccgtaatgctctcaatgtagtggaaaaactgcaacgtcaaggtttcgaggcttatatcgtcggtggatgtatccgcgatttattactcggtaaaaaaccaaaagattttgatgttgcaacaaatgctcgcccagagcaaatccaaaacatttttcaacgccaatgtcgtttagtcggtcgccgtttccgcttagcacatattatgtttggtcgagatattattgaagtcgccactttccgtgctaatcacagtgatgctcgcaatgaaaatcaagcgaaacagagcaatgaaggcatgttactgcgcgataatgtttacggtacgatcgaacaagatgcagcacgccgtgattttacggtcaatgcgctgtattacaatccgcaagataatacgttacgagattatttcgagggcattaaagatctcaaagcgggcaagctacgcttaattggcgatcctgttacacgttatcaagaagatcctgtgcgcatgctacgctcaattcgtttcatggcaaaacttgatatgttccttgaaaaaccaagcgaacaaccaattcgtgaacttgcgcctttattaaaaaatattccgccagctcgcttatttgacgaaagtttaaaattattgcaggcaggacaaggggtaaaaacctatcggttattacgccaatatggtttatttgaacaacttttccctgcattaagctcatattttacagagaaagaagatagctttgcagaacgcatgatcgttaccgcccttagttcgacagatgaacgtgttgcggataaacttcgtattaatcctgcattcttatttgcggcatttttctggtatccattacgcgaaaaagtggaaattttaaaaaatgaaggtggtttaaataatcatgatgcttatgctttagcaggtaatgaagttttagacttattctgccgagctttagctgcaccacgtcgtcatactgcggtcattcgagatatttggttcttacaactgcaattattaaaacgtactggctcagcaccaatgcgtaccatggaacatccaaaattccgtgctggctttgatttactggctatgcgtgcggaaattgaaggtggcgaaaccattgaattagccaaatggtggcacgaatatcaattcagcaatggtgaacagcgcgaacagttgatacacgagcaacaacgcttacatcctaaaccaaagaaaaaatactaccgtccacgccgtcgtaaaacaacgcgctcagctgaataa

SEQ ID NO: 114 - protein, 480 aa, Haemophilus influenzae
MFGKKTKKSKEVAKTSAHSKRVERSNSQMPKARAKKSEQTRRYDKNVIKAAQFDISPRDFSRNALNVVEKLQRQGFEAYIVGGCIRDLLLGKKPKDFDVATNARPEQIQNIFQRQCRLVGRRFRLAHIMFGRDIIEVATFRANHSDARNENQAKQSNEGMLLRDNVYGTIEQDAARRDFTVNALYYNPQDNTLRDYFEGIKDLKAGKLRLIGDPVTRYQEDPVRMLRSIRFMAKLDMFLEKPSEQPIRELAPLLKNIPPARLFDESLKLLQAGQGVKTYRLLRQYGLFEQLFPALSSYFTEKEDSFAERMIVTALSSTDERVADKLRINPAFLFAAFFWYPLREKVEILKNEGGLNNHDAYALAGNEVLDLFCRALAAPRRHTAVIRDIWFLQLQLLKRTGSAPMRTMEHPKFRAGFDLLAMRAEIEGGETIELAKWWHEYQFSNGEQREQLIHEQQRLHPKPKKKYYRPRRRKTTRSAE

SEQ ID NO: 115 - DNA, 483 bp, Haemophilus influenzae
atgattactgcatatattgctctaggtagcaatttaaacacaccaatagaacaattacatgctgcgcttaaagcgataagtcagttatcaaacactcatttggtaacaacgagctctttttataaaagcaaaccgctcggcccacaagatcaacccgattatgtgaatgccgttgcaaaaattgaaaccgaacttagtccgctcaagctattagatgaattacagcgtattgaaaacgagcaaggtcgagtgcgtttacgtcgctggggcgaacgcacgttagatttagatattttgctctacggcaatgaaattattcaaaacgaacgcttaacaattccccattatgatatgcataaccgtgagtttgtcattgtgccgttgtttgaaatagcatcggatttagttttaccaaatagtcaaatcataacagagctggtcaagcaatttgctgaccacaaaatgataaaattaaatccctag

SEQ ID NO: 116 - protein, 160 aa, Haemophilus influenzae
MITAYIALGSNLNTPIEQLHAALKAISQLSNTHLVTTSSFYKSKPLGPQDQPDYVNAVAKIETELSPLKLLDELQRIENEQGRVRLRRWGERTLDLDILLYGNEIIQNERLTIPHYDMHNREFVIVPLFEIASDLVLPNSQIITELVKQFADHKMIKLNP

SEQ ID NO: 117 - DNA, 438 bp, Haemophilus influenzae
atgctccgcttcggcaaaaaatttgcggaaattcttttaaaattgcatacagaaaaagcaattatggtttatcttaacggtgatcttggggcaggaaaaacaacgctaacgcgcggaatgttgcaaggtatcggtcatcagggtaatgtaaaaagcccaacttatacgctggttgaagaatacaatatcacaggcaaaatgatttatcattttgatttatatcgtttagcagatcctgaagagctcgaatttatgggcattagagattattttaatacggatagcatctgcttaattgaatggtctgaaaaaggtcaaggcatattgccagaagcggatattttagtgaatattgattattacgatgatgcacgaaatattgaattaatcgcacaaacaaatttgggtaaaaatattataagcgcattttctaattaa

SEQ ID NO: 118 - protein, 145 aa, Haemophilus influenzae
MLRFGKKFAEILLKLHTEKAIMVYLNGDLGAGKTTLTRGMLQGIGHQGNVKSPTYTLVEEYNITGKMIYHFDLYRLADPEELEFMGIRDYFNTDSICLIEWSEKGQGILPEADILVNIDYYDDARNIELIAQTNLGKNIISAFSN

SEQ ID NO: 119 - DNA, 1299 bp, Haemophilus influenzae
atgaaaactaaaattttattttttctttttttctcgacatttagcttttctatttttgcagctcctattacgattgcaattgaccctggtcatgggggaaaagatcctggtgcaatcggccgaaacttaggcatttatgaaaaaaatgttaccctttcaattgcaaaagaattaaaagccttattagataaagatccacattttcgtggtgtattaacgcgtaaaagtgattattatatttccgtgcctgaacgttcagaaatcgcacgcaaatttaaagcgaattatcttatttccattcatgcggattcatctgaatcgcctgatcgtcgcggggcttctgtttgggtattgtcaaaccgtcgagccaatgatgaaatgggtcaatggctagaagacgatgaaaaacgctcggaattacttggtggagcgggaaaggtgctttcacacaataatgacaaatatcttgaccagactgtacttgatctgcaattcggacatagccaacgtacaggctatgtgttaggcgaacatattttgcaccattttgctaaagtaacaacattaagtcgcagtacgccacaacatgcaagtctgggtgttctacgttcgccagatattccttctgtgttggtagaaacgggatttctttccaattcagaagaagaaaaaaaacttaattcccaaacttatcgtcgccgcattgcttatatgatttatgaaggcttagttgcattccatagcggtaaaaccaacactttagttaaagacaatttagtgcaaaacatcaaacaaaacgatataaaaaaatcagggaaaaataaccgcacttcagaacaaaatataaatgaagataatattaaagacagtggcattcgccatattgtaaaaaaaggagaaagtttaggcagcttatcaaataaatatcacgtaaaagtctctgatattattaaattaaatcaattaaagagaaaaacactttggctaaatgaaagtattaaaatccctgataatgtcgagataaaaaataaatcattaacaattaaagaaaatgattttcataaaaaacaaaatagctcagtaaataataccaataaagatttaaaaaaagagaaaaatacacaaactaataatcaaaaaaatataattccgctctatcataaagtaacaaaaaaccaaacactttatgctatttcgagggaatataacattccagtaaatatactattgagcctaaatccacatttaaaaaatggcaaagttattacaggacaaaaaataaaattaagagaaaaataa

SEQ ID NO: 120 - protein, 432 aa, Haemophilus influenzae
MKTKILFFLFFSTFSFSIFAAPITIAIDPGHGGKDPGAIGRNLGIYEKNVTLSIAKELKALLDKDPHFRGVLTRKSDYYISVPERSEIARKFKANYLISIHADSSESPDRRGASVWVLSNRRANDEMGQWLEDDEKRSELLGGAGKVLSHNNDKYLDQTVLDLQFGHSQRTGYVLGEHILHHFAKVTTLSRSTPQHASLGVLRSPDIPSVLVETGFLSNSEEEKKLNSQTYRRRIAYMIYEGLVAFHSGKTNTLVKDNLVQNIKQNDIKKSGKNNRTSEQNINEDNIKDSGIRHIVKKGESLGSLSNKYHVKVSDIIKLNQLKRKTLWLNESIKIPDNVEIKNKSLTIKENDFHKKQNSSVNNTNKDLKKEKNTQTNNQKNIIPLYHKVTKNQTLYAISREYNIPVNILLSLNPHLKNGKVITGQKIKLREK

SEQ ID NO: 121 - DNA, 1914 bp, Haemophilus influenzae
atgcctattaaaattctttccccacaacttgctaaccaaattgctgctggagaagtggtagaacgccctgcgtctgtggtgaaagaattagtggaaaatagccttgatgcaggtgcaaataaaatccaaattgatatcgaaaatggtggggcaaatttaatccgtattcgtgacaatggctgtggtattccaaaagaagaattaagcctcgctttggcgcgacatgccacgagtaaaattaccgatcttgatgatcttgaagcgattttaagtttaggttttcgtggcgaggcattggcaagtatcagctctgtatcacgcctaacccttacttctcgtaccgaagaacaaactgaagcgtggcaagtctatgcgcaaggtcgtgatatggaaaccacaatcaaacccgcatcacatcctgtcggcacaacagttgaagtcgccaatctttttttcaacacgccagcccgccgaaaatttttgcgcacagataaaacagaatttgctcatattgatgaagtcattcgccgcattgctttaacaaaattcaacacagcatttacattaacgcataatgggaaaattgtgcgtcaatatcgtcctgccgaagcaatcaatcagcaactaaaacgagtcgcagctatttgtggggatgattttgtcaaaaatgccttacgaattgagtggaaacacgatgatttacatttatcaggttgggtggccacaccaaattttagccgaactcaaaatgatttaagttattgctatattaatggccgaatggtgagagataaagtgatcagccatgctattcgacaagcctatgcacaatatttaccaaccgatgtttatcctgcgtttgtcttgtttattgacttaaacccgcacgatgtagatgtcaatgttcatccaaccaaacatgaagtacgctttcaccaacaacgcctcattcatgattttatttacgaaggcataagttatgcactaaacaatcaagaacagcttaattggcatacagaccaaagtgcggtagaaaatcgcgaagaaaatacggtgcgtgagccccaaccgaattacagcattcgtcctaatcgtgcagctgcggggcaaaatagctttgcgccacaatatcatgaaaaaccacagcaaaatcaaccgcacttttctaacacaccagtgttgccaaatcatgtaagtactggttatcgagattaccgttctgatgcaccgagtaaaactgagcaacgtttatatgctgaattgttacgctcgttaccgcctacagcgcaaaaggatatatcggatacagcacaacaaaatatttcagatacagcacaacaaaatatttcagatacagctaaaatcatctcaactgaaataattgagtgttcatcacatctacgagccctttcacttattgaaaatcgtgcgttgttattacaacagaaccaagatttctttttgctttcattggaaaaattacaacgcttgcaatggcaactagcgttaaaacaaatacagattgaacaacaaccattgttaattccaatcatatttcgtttaacagaggcacaatttcaagcatggcaacaatattcagatgacttcaaaaaaattggctttgaatttatcgaaaatcaagcacaattacgcttaaccttaaataaagtgccaagtgcattacgcacacaaaatctacaaaaatgcgtgatggcaatgctgactagagatgaaaattcatcatcatttttaaccgcactttgcgcacaattagaatgcaaaacctttaacgctttagcggacgcactcaatttattaagcgatacagaacgtttactgactcaaacgaatcgcacggcattcacccaattactcaaacctgttaattggcagcctttattagacgaaatttag

SEQ ID NO: 122 - protein, 637 aa, Haemophilus influenzae
MPIKILSPQLANQIAAGEVVERPASVVKELVENSLDAGANKIQIDIENGGANLIRIRDNGCGIPKEELSLALARHATSKITDLDDLEAILSLGFRGEALASISSVSRLTLTSRTEEQTEAWQVYAQGRDMETTIKPASHPVGTTVEVANLFFNTPARRKFLRTDKTEFAHIDEVIRRIALTKFNTAFTLTHNGKIVRQYRPAEAINQQLKRVAAICGDDFVKNALRIEWKHDDLHLSGWVATPNFSRTQNDLSYCYINGRMVRDKVISHAIRQAYAQYLPTDVYPAFVLFIDLNPHDVDVNVHPTKHEVRFHQQRLIHDFIYEGISYALNNQEQLNWHTDQSAVENREENTVREPQPNYSIRPNRAAAGQNSFAPQYHEKPQQNQPHFSNTPVLPNHVSTGYRDYRSDAPSKTEQRLYAELLRSLPPTAQKDISDTAQQNISDTAQQNISDTAKIISTEIIECSSHLRALSLIENRALLLQQNQDFFLLSLEKLQRLQWQLALKQIQIEQQPLLIPIIFRLTEAQFQAWQQYSDDFKKIGFEFIENQAQLRLTLNKVPSALRTQNLQKCVMAMLTRDENSSSFLTALCAQLECKTFNALADALNLLSDTERLLTQTNRTAFTQLLKPVNWQPLLDEI

SEQ ID NO: 123 - DNA, 936 bp, Haemophilus influenzae
atgaaaccaaccgcaatttttttaatgggcccaacagcctcaggtaaaacagatttagccattcaactacgaagctcacttccagtcgaagtgattagtgtagattcagcgctcatttataaaggaatggatattggcacagcgaaaccatcaaaagaagaacttgcccttgcgcctcaccgtttgattgatattttagatccatcagaaagctattccgcaatgaatttccgcgatgatgcactacgcgaaatggcggatattaccgcacaaggcaaaattccgttactagtgggcggcacgatgttgtattacaaagccttaattgaagggctttcccccttgccttctgctgatgaaaatattcgcgccgagcttgaacaaaaagcagctcaacaaggttgggcagcattgcatacagaactcgccaaaatcgatcctatttctgccgcccgaattaatcccagtgattctcaacgaatcaatcgcgctttagaggttttttatatcacgggaaaatcactcacagagctgactgaagaaaaaggcgaagccttgccttatgattttgtgcaatttgcaattgcgccgcaagatcgccatgttttgcatgaacgcatcgaacaacgctttcataaaatgattgaactaggctttcaagcagaagtggaaaaactttatgcacgtggcgatttaaatattaatctgccgtcaattcgctgtgtaggctatcgtcaaatgtgggaatatttgcaaggtgattacgcttacgaggaaatgattttccgtggtatttgcgctacgcgccaacttgcaaaacgccagcttacttggctgcgtggttggaaaacaccaatacaatggctagatagtttgcaacctcaacaagcgaaagaaactgtattacgtcacttagattcttatcaaaaaggttag

SEQ ID NO: 124 - protein, 311 aa, Haemophilus influenzae
MKPTAIFLMGPTASGKTDLAIQLRSSLPVEVISVDSALIYKGMDIGTAKPSKEELALAPHRLIDILDPSESYSAMNFRDDALREMADITAQGKIPLLVGGTMLYYKALIEGLSPLPSADENIRAELEQKAAQQGWAALHTELAKIDPISAARINPSDSQRINRALEVFYITGKSLTELTEEKGEALPYDFVQFAIAPQDRHVLHERIEQRFHKMIELGFQAEVEKLYARGDLNINLPSIRCVGYRQMWEYLQGDYAYEEMIFRGICATRQLAKRQLTWLRGWKTPIQWLDSLQPQQAKETVLRHLDSYQKG

SEQ ID NO: 125 - DNA, 2946 bp, Haemophilus influenzae
atgaccgcactttctgccctcatcgaacaaaaattacaatctcttggcacaatcctgtgccaatcttttccagaactttccccagaaaaaattcacgaagccattcaacaaaattcaaatcatccagaactgcctgtttatcaattaggttatgccatagcaatgtctgactttgtggaaaaagtcttgcaaaaatacccgcacttagtgaaacaatggtgggaaaaatccccctgttttgcagattgcactgcctatattgaacgtttgaatagagagttagccaatgtacatgacgaaactgcactctatcaaacattacgccaattccgtaacattgaaatggcaaaattaagtttttgtcaaagtttgaatcttgccactgttgaggaaatttttgttcagctttcacaacttgcagaaagtttaattatctctgctcgcgattggctttatcatcaagcctgtgcggagatgggcacaccaatggatgaacaaggcaatccgcagcagctttatatcctaggaatggggaaattaggcggctttgaactaaatttttcctcagatattgatttaatttttacttatccatcacaaggggaaacgtccgttgagaatacgaatgctcgacgttctgtggataatggaaaattttttacacgtttagggcaacgccttatttctaccttagatgaatttacctctgatggttttgtgtatcgaaccgatatgcgcttgcgcccatttggtgacagcggcgcgcttgttctcagctttgcagcaatggaacaatattatcaagatcaaggtcgagattgggaacgttatgcgatgattaaagggcgagtattgggcgtacaaacaaaggatcccaacgtttcaaaattgcaaaaaatgttacgcccttttgtctatcgccgttacattgactttagtgtgattcaatctttacgtgaaatgaaaggcaaaattgagcgagaagtacgccgtcgtggtttgaaagataatattaaactaggtgctggtggtattcgtgaagtcgaatttatcgtacaagtttttcaactcattcgaggcgggcgagaaatcaatctgcaacaacattcactcttaaagatcttgcctgaaattaccaaactaggattaattaccgaacaacaattccacgatttacgtgaaagttatatttttttacgccgcgtagaaaacattctacaagccattaacgatcaacaaacgcaaacactaccaaccaatgaaatagatcaaattcgtttagtcaaggcatgtaaaactttcacctgtttaaatgaaaataatcaaaccattgaaaaacattatccaatagaaaattgggacgatttttaccgcactttacaacaaaaacaagaaaaagtgcgggcagtatttactcaattaatcggtgatgaacaagatgagccttcacaaactgatagccaatggcaagattttttagaagcagattttgaggatattgaacaaacattattagagagtggtgtatcagaaaataatattgatgaagttttagaaaagcttgctcaattcaaaaacagcctaaatcacagagtgattggttcgcgtgggcgtgatgtattaagtcatttaatgccaacggtatttgcactcatttttgaacaagaaaattaccgcactttgctcccccgaatactgaacattattgaaaaaatttcgagtcgcacgacttatttagaattattattggaaaatcctcgtgcccttcagcaagttattgaactttgtgcgcagtctcaacttatttcagagcaactggcgcgccatcctatcttattagatgaattgcttaatacggaagcactacgccatccattgccatttacccaatatcctgcggagttacaccaatattttcttcgtttaccacttgatgatgaagaacagcttattgatgctttacgtcaatttaaacaagcaaccctattaaaagtggcagcggcagatattttaggtgcattaccagtaatgaaagtaagcgatcatttaacctatcttgctgaagccattattgaagtggttgtgaatctagcttggaaacaagtatcttctagatttggcgtgcctgaacatttacaaaatgatgaaaaaggatttttagttattggttatggaaaactaggtggtattgaactcggttataaatccgatttagacctcgtatttttgtacgatgccgtagaaagtcaaacaacaggtggcaaaaaagtgattgatagcaatcaattttacctacgcttggcacaaaagattgtgagtattttcagcataaatacttctgctggcgtactttatgaggcagatatgcgcctgcgcccttctggcgatgctggcttaattggctgctctctttctgcattttcccattatcaattgaatgacgcttggacatgggaaaaacaagcacttgtgcgtgctcgtccagtatttggcgaatcatctcttaaagctaaatttgagcatatccgccaacaagtgctttctgcatcacgagatattgaacaattaaaacaagatgttattgagatgcgaaaaaaaatgtttacccatttatctcactcaaaacacagtgaatttaaccttaaaacagatcgcggtggcattacagatatagaatttattgctcaatatttaatgcttgccaatgccccgaaaaaaccacaactaacaaaatggtcagacaatgtacgtattttcgatgatatggcagaggctaaaattattagccaaacagactgcgacacattaaaacaatgttatattgatttacgcaatgctattcaccatttaaatttgataggcaaatcccccgttgtggatgaaactgaatttgtcaaagagcggtcatttattcaagcattttgggataggttatttgtatcctaa

SEQ ID NO: 126 - protein, 981 aa, Haemophilus influenzae
MTALSALIEQKLQSLGTILCQSFPELSPEKIHEAIQQNSNHPELPVYQLGYAIAMSDFVEKVLQKYPHLVKQWWEKSPCFADCTAYIERLNRELANVHDETALYQTLRQFRNIEMAKLSFCQSLNLATVEEIFVQLSQLAESLIISARDWLYHQACAEMGTPMDEQGNPQQLYILGMGKLGGFELNFSSDIDLIFTYPSQGETSVENTNARRSVDNGKFFTRLGQRLISTLDEFTSDGFVYRTDMRLRPFGDSGALVLSFAAMEQYYQDQGRDWERYAMIKGRVLGVQTKDPNVSKLQKMLRPFVYRRYIDFSVIQSLREMKGKIEREVRRRGLKDNIKLGAGGIREVEFIVQVFQLIRGGREINLQQHSLLKILPEITKLGLITEQQFHDLRESYIFLRRVENILQAINDQQTQTLPTNEIDQIRLVKACKTFTCLNENNQTIEKHYPIENWDDFYRTLQQKQEKVRAVFTQLIGDEQDEPSQTDSQWQDFLEADFEDIEQTLLESGVSENNIDEVLEKLAQFKNSLNHRVIGSRGRDVLSHLMPTVFALIFEQENYRTLLPRILNIIEKISSRTTYLELLLENPRALQQVIELCAQSQLISEQLARHPILLDELLNTEALRHPLPFTQYPAELHQYFLRLPLDDEEQLIDALRQFKQATLLKVAAADILGALPVMKVSDHLTYLAEAIIEVVVNLAWKQVSSRFGVPEHLQNDEKGFLVIGYGKLGGIELGYKSDLDLVFLYDAVESQTTGGKKVIDSNQFYLRLAQKIVSIFSINTSAGVLYEADMRLRPSGDAGLIGCSLSAFSHYQLNDAWTWEKQALVRARPVFGESSLKAKFEHIRQQVLSASRDIEQLKQDVIEMRKKMFTHLSHSKHSEFNLKTDRGGITDIEFIAQYLMLANAPKKPQLTKWSDNVRIFDDMAEAKIISQTDCDTLKQCYIDLRNAIHHLNLIGKSPVVDETEFVKERSFIQAFWDRLFVS

SEQ ID NO: 127 - DNA, 1677 bp, Haemophilus influenzae
atgcttactcaacttactatcaataattttgcgattgttcgtcagcttgatattgaattggcgaaaggaatgtctgttataacaggggaaactggtgctggaaaatctatcgccattgatgctttaggtttatgtttcggacaaagagtagaaacctcaatggtgcgtgaagggcaagagcgtgcggaaatttgtgcaactttccaactagaatcgcaaaatcctgcttatcactggttgagtgagcaagaattacaggatccagataatccaactgaatgtattttacgtcgcataattaatgcagacggacgttctaaggcttttattaatagtacaccagtatccgcttctcaattaaaagaaattgctcaatatcttgttcatattaatgggcaacacgcttctcaattattgttaaaaaatgactatcagcttcagttagttgataattttgccgctcatcctgaattacttgtgaaaatgcgtgaagattatcagacatggaaaaatcttcaaaatcaagttaaaacctttcaacaaaaagtggcggaaaatgaagcacgtaaacaacttttacagtatcaagtggatgagttagatgaatttaaccttcgatcaaatgaatatttggaattagaagatgaacaacgtcgtttatctagcagcgaacagctaactcaactttcccaatcagcactgcaaattttaagtgaaaatgacaccgtaaatatcgatagtttgctttatcgtgcgacacaatatattgatgaattagctgaacttgatccgcaatatgctgaagtgcaaaatatgttgaatgatgcgttgattcaagtgcaagaagcaaccagtgaagtgcaaaatttatcaagtaatatcgagcaagatcctcagcttttacaggaaatcgaacaaagaattagtcagactttacaacttgctcgtaaacatcaagttaaacctgaagatcttgtagaacagcacaaaaaattaaaagcagaattaaccgcacttttggatttttctgaaagtgaagagatgttgattgagcaagaaaaactcgcatttgaacaaatgcaagcaacggctacagcattaacagcaagtcgtcagcaatctgcaacccgcttagcgcaaaatgtcacacagtcgataaaacaacttgcaatggaaaacgctgaattttatgtagagttgaatacggatttagataaagtgagtgcaaatggtgcggataatgtgattttcactttgcgtagtaatttaggacaacaaccgcagccattagctaaaattgcctctggtggtgagctttctcgtatttctttagcgattcaagttttaacttctgatcaatcagctattccaaccttaattttcgatgaagtggacgtgggcattagcggaaaaacagcaagcgttgtcggaaaacttttacgtcaattaagtgagcgttgtcaagtattatgcgtcactcacttgccacaggttgcttgtcatggccatcatcagtttaatgtggaaaaatttactgtggataataaaactgaaacaaaaatgaccgcactttcacaagctgaacgtgtaccagccttggcaagactcttgggcggaagtgaaatcacagaattagctctagccaatgcacaggaaatgttagatttggttcattaa

SEQ ID NO: 128 - protein, 558 aa, Haemophilus influenzae
MLTQLTINNFAIVRQLDIELAKGMSVITGETGAGKSIAIDALGLCFGQRVETSMVREGQERAEICATFQLESQNPAYHWLSEQELQDPDNPTECILRRIINADGRSKAFINSTPVSASQLKEIAQYLVHINGQHASQLLLKNDYQLQLVDNFAAHPELLVKMREDYQTWKNLQNQVKTFQQKVAENEARKQLLQYQVDELDEFNLRSNEYLELEDEQRRLSSSEQLTQLSQSALQILSENDTVNIDSLLYRATQYIDELAELDPQYAEVQNMLNDALIQVQEATSEVQNLSSNIEQDPQLLQEIEQRISQTLQLARKHQVKPEDLVEQHKKLKAELTALLDFSESEEMLIEQEKLAFEQMQATATALTASRQQSATRLAQNVTQSIKQLAMENAEFYVELNTDLDKVSANGADNVIFTLRSNLGQQPQPLAKIASGGELSRISLAIQVLTSDQSAIPTLIFDEVDVGISGKTASVVGKLLRQLSERCQVLCVTHLPQVACHGHHQFNVEKFTVDNKTETKMTALSQAERVPALARLLGGSEITELALANAQEMLDLVH

SEQ ID NO: 129 - DNA, 891 bp, Haemophilus influenzae
atgaatcatttatatcgttcctttaaaaccattgctcttgtaggtaagcctcgcaatgatattaacttacaaatgcacaaaaacttatttcattggttaatggaacgtggttatcaagtgttggtggaaaaagaagtcgccataacacttgagttaccttttgaacatcttgctacgttagaagaaataggtggccgagcccaattagccattgtgattggtggagacggcaatatgctagggcgcgctcgcgtattagcaaaatatgatattccattgattggtattaatcgtggtaatttgggatttttaacggatattgacccgaaaaatgcctattcccagcttgaagcttgtttagaacgtggcgaattttttgtggaagaacgttttttattggaagcaaaaatcgaacgagcaagtgaaatcgtatcaaccagcaatgcggtaaatgaagcggttattcatcccgccaaaattgcacatatgattgattttcacgtatatatcaatgataagtttgcattttctcaacgttctgatggattaattgtttctactccaacaggttctacggcttattctctttccgctggtggacctattttgacaccaaaccttaatgccattgcattagtgccaatgtttccacatacattaacttctcgccctcttgttgttgatggggatagtaaaatatcaattcgttttgctgaacataatacctctcaattagaagtgggctgtgatagtcaaattaccttaccttttaccccagatgatgtggtgcatattcaaaaaagcgagcataaactccgattgcttcatctgaaaaattataattattacaatgtgttaagtagcaaattaggttggttaaaatcattttga

SEQ ID NO: 130 - protein, 296 aa, Haemophilus influenzae
MNHLYRSFKTIALVGKPRNDINLQMHKNLFHWLMERGYQVLVEKEVAITLELPFEHLATLEEIGGRAQLAIVIGGDGNMLGRARVLAKYDIPLIGINRGNLGFLTDIDPKNAYSQLEACLERGEFFVEERFLLEAKIERASEIVSTSNAVNEAVIHPAKIAHMIDFHVYINDKFAFSQRSDGLIVSTPTGSTAYSLSAGGPILTPNLNAIALVPMFPHTLTSRPLVVDGDSKISIRFAEHNTSQLEVGCDSQITLPFTPDDVVHIQKSEHKLRLLHLKNYNYYNVLSSKLGWLKSF

SEQ ID NO: 131 - DNA, 720 bp, Haemophilus influenzae
atgattcataaaatgaccgcacttgaatttaacattttcgtcattatatcgttttttgctacactatgcccaattacgattaatcaattttgttttacggagaaaaaaatgtcagaacaagaacaaaaagttaaaaacccagaagtagaaaatcaagaagtagaaaatcaagaagaagtcgttgtggaagaagcacaacaagcagctccttctcaagaatttgatcctttagaagaagctattgcccgcgtgcaagagcttgaagagcagctaaaaactcaaatagaagaagccgcaaataaagaacaggatattttacttcgctctcgtgctgaaattgaaaatcttcgtcgtcgtactgaacaagacgtagaaaaagcacataaattcgctttggaaaaattttcaaaagacattttgaatactatcgataacctagagcgtgcgcttgccactccagcaaataaagaagatgaaagcgtaaaagccttatttgacggtgtagaactaaccttaaaagaattagtttcaaccgttgggcgttttggcgtggaagctgtgggagttgtcggtgaagcatttaatcctgatttacatcaagccatttcaatgcaacctgctgaaggctttgaaaccaatcaaattagcgtggtattgcaaaaaggctacaccttaagtggtcgagtcattcgcccagcgatggtaatggtggcagcttaa

SEQ ID NO: 132 - protein, 239 aa, Haemophilus influenzae
MIHKMTALEFNIFVIISFFATLCPITINQFCFTEKKMSEQEQKVKNPEVENQEVENQEEVVVEEAQQAAPSQEFDPLEEAIARVQELEEQLKTQIEEAANKEQDILLRSRAEIENLRRRTEQDVEKAHKFALEKFSKDILNTIDNLERALATPANKEDESVKALFDGVELTLKELVSTVGRFGVEAVGVVGEAFNPDLHQAISMQPAEGFETNQISVVLQKGYTLSGRVIRPAMVMVAA

SEQ ID NO: 133 - DNA, 345 bp, Haemophilus influenzae
atgactagttttgcacagcttgatataaaatctgaagaattggcgattgtgaaaactattttacaacaattcgtacctgattataccgtatgggctttcggttctcgtgtaaagggaaaagcaaaaaaatattccgatcttgaccttgcgattatctctgaggaacctttagattttttagctcgtgacagattaaaagaagctttttctgaatcagatttaccgtggcgcgttgatcttctagattgggctacaacgagcgaagattttagggaaattatccgtaaagtttatgttgttattcaggaaaaagaaaaaacggtcgaaaaaccgaccgctctttag

SEQ ID NO: 134 - protein, 114 aa, Haemophilus influenzae
MTSFAQLDIKSEELAIVKTILQQFVPDYTVWAFGSRVKGKAKKYSDLDLAIISEEPLDFLARDRLKEAFSESDLPWRVDLLDWATTSEDFREIIRKVYVVIQEKEKTVEKPTAL

SEQ ID NO: 135 - DNA, 432 bp, Haemophilus influenzae
atgatgactgataagctaaatttaaatgtattagacgctacattttattcgttagagcaaaccgtagtacaaatttcagacagaaattggtttgatatgcaaccctctattgtacaagataccttaattgcaggtgcaattcagaaatttgaatttgtttatgagttaagtttaaaaatgatgaaacgccaacttcaacaagatgcaattaataccgatgacattggggcttatggatttaaggatattttgcgagaagcattgagatttggtttgattgaagatatgtcaaaatgggttgcttatcgtgatatgcgtaatattacatcacatacttatgatcaggaaaaagccatggctgtttatgcacaaattgatgattttttaatagaaagtcgtttcctattggaacaattacgtcagagaaattaa

SEQ ID NO: 136 - protein, 143 aa, Haemophilus influenzae
MMTDKLNLNVLDATFYSLEQTVVQISDRNWFDMQPSIVQDTLIAGAIQKFEFVYELSLKMMKRQLQQDAINTDDIGAYGFKDILREALRFGLIEDMSKWVAYRDMRNITSHTYDQEKAMAVYAQIDDFLIESRFLLEQLRQRN

SEQ ID NO: 137 - DNA, 2124 bp, Haemophilus influenzae
atgagtaactttggggtcatcaagcgcgatggttctcgtgcggagtttgagattcaacgtatcattaatgccattaaaaaagccgcaagtgcggtcaatatttccgatgaattttattgccaccaaattgggcaagaagtagggaatgaaattttcacccgtcatcaaggcgagattgatattaatcagattcaaaaaatcgttgaagataaattgatggcaagtcgttatcctgaaattgctcgtgcgtatatcgaatatcgtcatgatcgtgatttagcacgagaaaaacgtagccagctaacaaaagaaattgaaggtttgattgaacaaagcaacgtagaattacttaatgaaaacgccaataaagacgcgaaagtgattccaacacaacgagatttgcttgctgggattgtggcaaaacattatgccaagcaccatattcttccacgcgatgtggtagaggctcacgaaaaaggtgaaattcattatcacgatttagattacgcgccgttctttccaatgtttaactgtatgttagttgatttagaagggatgctttctcgtggtttcaaaatgggcaatgcggaaatcgaaccccctaaatctatcggcaccgcaacggcagtgacagcacaaattatcgcccaagttgccagccatatttacggtggcacaaccattaatcgtattgatgaagtactttccccttatgtgcaaatcagttacgaaaaacatctcaaacatgcccaagaatggaacgtgcctgatgttgaaggttatgccaaagcattgattgaaaaagaatgtttcgatgccttccaatccttagaatatgaagttaatacactacatacttcaaatgggcaaacaccatttgtgacctttggttttggtttaggtacaagctggcaatctcgcttaattcagcaagctattttaaaaaatcgtattcgtggacttggaaaaaatcataaaacgccagtctttccaaaacttgttttcaccattaaaaaaggcttgaaccaaactcaaggcgatccgaattacgatatcaaacaactcgcattgaaatgtgcatcaaaacgtatgtatccagatattctcaattacgatcaagttgtcaaagtcacgggatcttttaaagcccctatgggatgtcgtagctttttaggtgcatacgaagaaaaaggtcacgaaattcacgatgggcgtaataatcttggcgtagtgagtttgaatttaccgcgtattgcgttggagtccaaaaacgaagaagatttctaccgcactttagatgaacgtttggctattgcgaaaaaagcattaatgacgcgtgttgcccgccttgagaataccaaagctcgcgttgctcccattctttatatggaaggtgcatgcggagtgcggttaaaagcggatgaaaatgtggcacaaattttcaaaaatggacgagcctctatttcgctcggctatatcggtattcatgaaaccattaatgcgctatataaaaaagggcatatttttgatgatgaacaattacgcgaaaaaggcattgcgattgttcgccaccttagcgaggcagtaaaacgctggcaaaaagaaactggctatgccttcagcctttactccacgccaagcgaaaacttatgcgaccgcttctgccgtctagataccaaaaaatttggcgtgattgaaggcgtcacggataagggctactacacgaacagttaccacttagatgtagaaaagaaagtgaatccttacgacaaactggattttgaaatggcatatcccccactcgccagcggcggttttatttgctacggcgaatatccaaatattcaacacaacttaaaagcattggaagatgtgtgggattatagctacgatcgcgtaccttactacggcacaaacacaccgattgacgagtgttatgaatgtggtttcactggcgagtttgaatgtaccagcaaaggttttgtctgccctaaatgtggcaatcacgacagcacaaaagtgtctgtcactcgccgcgtctgtggctatctaggcagccctgatgcccgcccatttaatgcgggaaaacaggaagaagtgaagagaagagttaaacacctttga

SEQ ID NO: 138 - protein, 707 aa, Haemophilus influenzae
MSNFGVIKRDGSRAEFEIQRIINAIKKAASAVNISDEFYCHQIGQEVGNEIFTRHQGEIDINQIQKIVEDKLMASRYPEIARAYIEYRHDRDLAREKRSQLTKEIEGLIEQSNVELLNENANKDAKVIPTQRDLLAGIVAKHYAKHHILPRDVVEAHEKGEIHYHDLDYAPFFPMFNCMLVDLEGMLSRGFKMGNAEIEPPKSIGTATAVTAQIIAQVASHIYGGTTINRIDEVLSPYVQISYEKHLKHAQEWNVPDVEGYAKALIEKECFDAFQSLEYEVNTLHTSNGQTPFVTFGFGLGTSWQSRLIQQAILKNRIRGLGKNHKTPVFPKLVFTIKKGLNQTQGDPNYDIKQLALKCASKRMYPDILNYDQVVKVTGSFKAPMGCRSFLGAYEEKGHEIHDGRNNLGVVSLNLPRIALESKNEEDFYRTLDERLAIAKKALMTRVARLENTKARVAPILYMEGACGVRLKADENVAQIFKNGRASISLGYIGIHETINALYKKGHIFDDEQLREKGIAIVRHLSEAVKRWQKETGYAFSLYSTPSENLCDRFCRLDTKKFGVIEGVTDKGYYTNSYHLDVEKKVNPYDKLDFEMAYPPLASGGFICYGEYPNIQHNLKALEDVWDYSYDRVPYYGTNTPIDECYECGFTGEFECTSKGFVCPKCGNHDSTKVSVTRRVCGYLGSPDARPFNAGKQEEVKRRVKHL

SEQ ID NO: 139 - DNA, 861 bp, Haemophilus influenzae
atgtcagatattctcaataaccttattcatcttcttaaacttgaaaaaattgatgatttaatctttcgtggtgaaagccaagatttaggttttcgccaagtatttggcggtcaagtagtggcacaggcgttatctgcagcaatgcaggtggcaccagaagatcgcattttacattcttgtcatgcctattttcttgctccaggagacagccaatatccgattatttacgatatagaaaccttgcgtgaagggcgtaatttttctgcattacgcgtaaaagccattcaacataaaaataccatttgtcatgtaaccgcttctttccaagtgccagaaaaaggttttgaacatcaaaattcaatgccaaatgttggcgcgcctgaagactttacagatgaaaatgtgatgctacaaaaagtggctcaaaccttgccagaaccactcaatgaaaaatttgcggcagagcgtccatttgaggtacgtaccaaatatttgaataacccatttaacgggacaaaattgccagccgagcaatattcttggtttaaaaccaatggtgaaacgccgcttgatataaaaattcagcaatgtttattggcttatttttcagattttcactgtattttgaccgcacttcatccgcacgaaaaaggctttttacaaaaaggaatgaaagtggcaaccattgatcatagtatttggttccatcgtccgtttgatttaaatcactggcatttgcacgcaattgaaagcaataatgcctttggaggccgtggtttggcgcgcgggcaaattttctcgcaagatggtcaattaatcgcgacaacacaacaagaaggtttgatccgttttaacgaataa

SEQ ID NO: 140 - protein, 286 aa, Haemophilus influenzae
MSDILNNLIHLLKLEKIDDLIFRGESQDLGFRQVFGGQVVAQALSAAMQVAPEDRILHSCHAYFLAPGDSQYPIIYDIETLREGRNFSALRVKAIQHKNTICHVTASFQVPEKGFEHQNSMPNVGAPEDFTDENVMLQKVAQTLPEPLNEKFAAERPFEVRTKYLNNPFNGTKLPAEQYSWFKTNGETPLDIKIQQCLLAYFSDFHCILTALHPHEKGFLQKGMKVATIDHSIWFHRPFDLNHWHLHAIESNNAFGGRGLARGQIFSQDGQLIATTQQEGLIRFNE

SEQ ID NO: 141 - DNA, 1380 bp, Haemophilus influenzae
atgctaaaaattttcaataccttaacgagagaaaaagaaatctttaaacctatccacgaaaataaagtgggaatgtatgtttgtggcgttactgtttatgatttgtgccatatcggtcatggacgcacttttgtgtgttttgatgtgattgcccgttatttacgttctttgggttacgatttaacttatgtgcgcaatattacggacgtagatgacaaaatcatcaaacgtgcattagaaaacaaagaaacctgcgatcagctagtggatcgtatggtacaggaaatgtataaagattttgatgcacttaatgtattacgccctgattttgagcctcacgcaacccatcatattcctgaaattattgaaattgtggaaaaattgattaaacgtggacatgcttatgttgcggataatggcgatgtgatgtttgatgtagaaagcttcaaagaatacggcaaattatcccgtcaagatcttgagcaattacaagctggtgcacgtattgaaatcaatgaaatcaagaaaaatccaatggatttcgtgctttggaaaatgtcgaaagaaaacgagccaagttggtcttccccttggggcgcaggtcgtccaggttggcatattgaatgttctgcaatgaactgcaaacagcttggcgaacattttgatattcacggcggtggctctgatttaatgttccctcatcacgaaaatgaaattgcgcaatcttgctgtgcgcatggtggacaatatgtgaattattggatccattccggcatgattatggtggataaagaaaaaatgtcgaaatctctcggcaatttcttcacaattcgtgatgtattaaatcactataatgcagaggcggtacgttatttcttattaacggcacattatcgtagccagctaaattacagcgaagaaaacttgaatttagcgcaaggtgcgttggaacgtttatacacggctttacgtggaacggatcaaagtgcggttgcttttggcggagaaaattttgtggaaaccttccgtgaagcaatggacgatgattttaatacgccaaatgcactttctgttttattcgaaatggcgcgtgaaattaacaagttaaaaacagaggatgcggagaaagccaatggacttgccgcgcgtttgcgtgaattaggggcgattttaggattacttcaacaagatccagaaaaattcttacaagcaggttctgacgatgatgaagtggcaaaaattgaagcactgattaaacaacgcaatgaagcccgcgctgctaaagattgggctactgctgatgctgcgcgtaatgagcttaccgctatgggcatcgtattagaagatgggccgaatggaacaacttggcgtaagcaataa

SEQ ID NO: 142 - protein, 459 aa, Haemophilus influenzae
MLKIFNTLTREKEIFKPIHENKVGMYVCGVTVYDLCHIGHGRTFVCFDVIARYLRSLGYDLTYVRNITDVDDKIIKRALENKETCDQLVDRMVQEMYKDFDALNVLRPDFEPHATHHIPEIIEIVEKLIKRGHAYVADNGDVMFDVESFKEYGKLSRQDLEQLQAGARIEINEIKKNPMDFVLWKMSKENEPSWSSPWGAGRPGWHIECSAMNCKQLGEHFDIHGGGSDLMFPHHENEIAQSCCAHGGQYVNYWIHSGMIMVDKEKMSKSLGNFFTIRDVLNHYNAEAVRYFLLTAHYRSQLNYSEENLNLAQGALERLYTALRGTDQSAVAFGGENFVETFREAMDDDFNTPNALSVLFEMAREINKLKTEDAEKANGLAARLRELGAILGLLQQDPEKFLQAGSDDDEVAKIEALIKQRNEARAAKDWATADAARNELTAMGIVLEDGPNGTTWRKQ

SEQ ID NO: 143 - DNA, 510 bp, Haemophilus influenzae
atggttacattacacacaaattttggcgacattaaaattaaattggattttgataaagctccagttacggcagaaaatttcttaaattactgcaaagacggtttttataataacacaatttttcaccgtgttattgatggttttatgattcaagggggtggtatggaaagcggtatgcgtgaaaaagcaactaaagcaccaatccaaaatgaagcgaacaatcgtttaagcaacaaacgtggaaccattgcaatggcacgcacgtcagatccacattcagcgaccgcacaatttttcattaacgtggcagacaatgatttcttaaattatcgttcaaaagaaatgtttggtcgagaagtcgttcaagaatggggctatgcagtatttggtgaagtggttgaagggatggatgttgttgataaaatcaaaaaagtgaaaacaggcaacaaaggctttcatcaagatgttccaactgaagatgtagtgattacattggtttcagtagaataa

SEQ ID NO: 144 - protein, 169 aa, Haemophilus influenzae
MVTLHTNFGDIKIKLDFDKAPVTAENFLNYCKDGFYNNTIFHRVIDGFMIQGGGMESGMREKATKAPIQNEANNRLSNKRGTIAMARTSDPHSATAQFFINVADNDFLNYRSKEMFGREVVQEWGYAVFGEVVEGMDVVDKIKKVKTGNKGFHQDVPTEDVVITLVSVE

SEQ ID NO: 145 - DNA, 789 bp, Haemophilus influenzae
atgcctttcttcgacactcacacgcatcttgattatctccaacaatttactggggagccgttgtcacagcttattgataatgctaagcaagccgatgtgcaaaaaatactgattgtggcggtgaaagaagctgattttaaaacaatccaaaatatgaccgcactttttcctgataatttgtgctatgggcttgggctccatcctctttatattcaagaacacgccaaaaatgatttgattctgttagaacaagccttaaaaaatcgtgatgcaaattgcacggcagtggcagaaattggtttagaacgcgcgattcctgatttgctcaccgatgaattttgggcaaagcaatgtcatttttttgaaagccaactttatttggcaaagcaatttaatttacccgtcaatattcacagtcgaaaaacccatgatcaaatttttacttttttaaaacgtattccattatctaaacttggcgtggtacacggtttttcaggaagctacgatcaagcaaaacgctttgttgatttaggctataaaatcggagttggcggcactatcacttatgaacgagccaataaaactcgtcaagcaatcgcgaagttgccgcttgatgccttagtgttggaaacagacagtccagatatgcctgtatttggttttcaaggccaacctaatcgaccagaacgtattgtggaaagttttaaagccctttgcaccttaagaaatgaacctgctgaattgattaaaaaacttacatgggaaaatgcttgccagattttttcttga

SEQ ID NO: 146 - protein, 262 aa, Haemophilus influenzae
MPFFDTHTHLDYLQQFTGEPLSQLIDNAKQADVQKILIVAVKEADFKTIQNMTALFPDNLCYGLGLHPLYIQEHAKNDLILLEQALKNRDANCTAVAEIGLERAIPDLLTDEFWAKQCHFFESQLYLAKQFNLPVNIHSRKTHDQIFTFLKRIPLSKLGVVHGFSGSYDQAKRFVDLGYKIGVGGTITYERANKTRQAIAKLPLDALVLETDSPDMPVFGFQGQPNRPERIVESFKALCTLRNEPAELIKKLTWENACQIFS

SEQ ID NO: 147 - DNA, 255 bp, Haemophilus influenzae
ttgcgtgggccttatacatcattagtggatttatttgaatcggcattacctgatattttaatgctcgaattttctacgccaagagcaggagagttaagttcgttattagaaagtgaaatcttaagacaaaaatgtattttaggcttaggcgtcatcaatcctcgttctgatgaagtggaaactgcaacacaaattgttcagcgtacagaaaaagccttaaattaccttccaccagagcaaatatcaaaattttag

SEQ ID NO: 148 - protein, 84 aa, Haemophilus influenzae
MRGPYTSLVDLFESALPDILMLEFSTPRAGELSSLLESEILRQKCILGLGVINPRSDEVETATQIVQRTEKALNYLPPEQISKF

SEQ ID NO: 149 - DNA, 324 bp, Haemophilus influenzae
atgagcgaagtattacacattaatgacgcagattttgaaagtgttgtagttaattcagatatccccgttttattagacttttgggcaccttggtgtggtccttgcaaaatgattgcaccagtgttagatgaacttgcacctgaatttgcaggtaaagttaaaatcgtgaaaatgaatgtggatgataaccaagcaacgccagcacaatttggtgttcgtagtatcccaacattattattgattaaaaatggtcaagttgttgcaactcaagttggtgcattaccaaaaactcaattagctaacttcattaaccaacatatttaa

SEQ ID NO: 150 - protein, 107 aa, Haemophilus influenzae
MSEVLHINDADFESVVVNSDIPVLLDFWAPWCGPCKMIAPVLDELAPEFAGKVKIVKMNVDDNQATPAQFGVRSIPTLLLIKNGQVVATQVGALPKTQLANFINQHI

SEQ ID NO: 151 - DNA, 996 bp, Haemophilus influenzae
atgaaaattgcaatctatagcactaaaagttatgacagaaaatatattgagctcattaacgcgaaatataatttcgatttagaattttttgattttatgctgaacgagagcactgtgcgtttggcagaacattgcgaagtagtatgcattttcgtgaatgataatggtagccgaaaagtattagaaaaattagccgcacttggtgtgaaaattgtggctttgcgctgtgccggtttcaataatgttgatttaaaagcagctcaagaattaggcatccaagttgtccgcgttccagcttattcgcctgaagcggtggcggaacataccatcggtttgatgatgactctgaaccgtcgaattcatcgtgcttatcagcgtacccgagaagcgaatttctctcttgaggggttaattggtttcaatatgtacggacgcacagtcggcgtaatcggaacaggaaaaatcgggatcgcagtgatgcgaattttgaaaggttttggcatgaatatcttggcgtacgatccttttaaaaatccagtggtggaagaactggggggacaatatgttgaattagatgagctttatgctaaatctcatgtgattacgcttcattgcccagcaacgccagaaaactatcatttattaaatcgcgaggcttttgcaaaaatgaaagatggcgtgatgatcgttaatacgagtcgcggttctttgattgatactcaagctgcaattgatgcgttaaaacagcgtaaaatcggtgcgttaggtatggatgtttacgagaatgaacgtgatttattctttgaagataagtctaacgaagtgattcaagatgatattttccgccgtttatcttcttgccataatgtattgctaacaggtcaccaagcgtttttaaccgaagaagcactaaccaatattgcagacgtgactttatcaaacatttataaattaaaatctggtaaagtgtgtgaaaatattgttttgccgtcttag

SEQ ID NO: 152 - protein, 331 aa, Haemophilus influenzae
MKIAIYSTKSYDRKYIELINAKYNFDLEFFDFMLNESTVRLAEHCEVVCIFVNDNGSRKVLEKLAALGVKIVALRCAGFNNVDLKAAQELGIQVVRVPAYSPEAVAEHTIGLMMTLNRRIHRAYQRTREANFSLEGLIGFNMYGRTVGVIGTGKIGIAVMRILKGFGMNILAYDPFKNPVVEELGGQYVELDELYAKSHVITLHCPATPENYHLLNREAFAKMKDGVMIVNTSRGSLIDTQAAIDALKQRKIGALGMDVYENERDLFFEDKSNEVIQDDIFRRLSSCHNVLLTGHQAFLTEEALTNIADVTLSNIYKLKSGKVCENIVLPS

SEQ ID NO: 153 - DNA, 1110 bp, Haemophilus influenzae
atgacacaacaatatgctattgatactttattagctcaagcaggcaatcgcagtgatgagcgtacgggcgcggtttctgcaccaatttttctttctacggcttatggtcattgtggtatcggtgaaagtacgggatttgattacacacgtaccaaaaatccaactcgcacagtattagaagaaacgatagctaaattagagaatggagatcgtggttttgcgttttcttctggtatggctgcaattcaagttttgatgacactttttaccgccccagatgaatggattgtttctagcgatgtgtatggtggtacttatcgattattagatttttcttataaaaataacaatagtgtaaaacctgtttatgttaatacagcatctgcttcagaaattgaggctgccattaacccaaatacgaaagcgatttttattgaaaccccatcaaatcctttaatggaagaatgtgatgtagttgaaattgcaaaacttgcgaaaaaatataatttgatgttgatcgtggacaatacgtttctaacgcctgtgctttctcgtccgttagatttaggcgctgatgtggtaattcacagcggaactaaatatattgctggtcataatgatgcacttgttggtttaatcgttgcaaaagggcaagaactttgtgatcggattgcttatattcaaaatggtgcaggtgcggtgctttctccttttgattcttggctgactattcgtggtatgaagaccctttctttgcgtatgaaacgccatcaagaaaatgcacaagccattgcggaatttttaaaagctcaaccacaagtggaatcggtgctttatccaaataaaggtgggatgttgtctttccgtttgcaagatgaagcttgggttaatacattcttaaaatccatcaaattgattacttttgcagaaagtctaggcggcacagaaagttttattacttatcctgccactcaaactcatatggatattccagaacccgagcgtgtagctcgtgggattactaataccttgttgcgtttttcagtcggtattgaagatgtagaagatattaaagcggacttattacaggcttttgcaaacttaaaataa

SEQ ID NO: 154 - protein, 369 aa, Haemophilus influenzae
MTQQYAIDTLLAQAGNRSDERTGAVSAPIFLSTAYGHCGIGESTGFDYTRTKNPTRTVLEETIAKLENGDRGFAFSSGMAAIQVLMTLFTAPDEWIVSSDVYGGTYRLLDFSYKNNNSVKPVYVNTASASEIEAAINPNTKAIFIETPSNPLMEECDVVEIAKLAKKYNLMLIVDNTFLTPVLSRPLDLGADVVIHSGTKYIAGHNDALVGLIVAKGQELCDRIAYIQNGAGAVLSPFDSWLTIRGMKTLSLRMKRHQENAQAIAEFLKAQPQVESVLYPNKGGMLSFRLQDEAWVNTFLKSIKLITFAESLGGTESFITYPATQTHMDIPEPERVARGITNTLLRFSVGIEDVEDIKADLLQAFANLK

SEQ ID NO: 155 - DNA, 1278 bp, Haemophilus influenzae
atgaatttatacaatatcaaacacccagaagaacaagtcactttttctcaggctgttcgtcaaggtcttgggcgggatcaaggtctattctttccagaagttattcctcaacttaataacattaatgaattacttgaattgcctgttgttgagcgtagtcaaaaaattctaggtgcattaattgatggcgagttaccacaagcaacgttagatgcgatggtgaaaaatgcattcacttttcctgcaccgttagaaaaagtggaagataatatttatgcacttgaattatttcacggtccaacgctagcatttaaagattttggtgggcgttttatggctcaggcgcttgcagcagttcgtggtgatggcaaaattactattttaacggctacgtctggagatactggagccgctgtagcacatgcgttttatggattagaaaatattaatgtagttatcctttatccaaaaggcaaaatcagcccattgcaagaaaagctattctgtactttaggtgggaatattcgtactgttgctattaacgctgatttcgatgcgtgtcaggctttagttaaacaagcctttgatgatgttgaattacgccaaactatccgacttaactctgcaaattctattaatatcagccgtttattagctcaagtttgttattactttgaggctgtcgcacaattgccaaaagaaaaacatgataatgttgtggtttctgtgccaagtggtaattttggtaacttaacggcgggattaattgcaaaaaccttaggcttgccgataaaacgctttgtcgcctcaacaaacgcaaatgatactgtgccacgttatttgaaatcgggtaattgggatcctaaaacgacagttgtaaccctttctaatgcaatggatgtaagtcgcccaaataattggccgagagtggaggaattgtttaaacgaaatggttgggatttaactgatttaggttcggggatgctaagtgatagcgaaacagaagatactttaaaagcgatgcagtcgaaaggttatttatgtgagcctcacggtgcgatagcttatcaggtgttgaaagatcaacttaaagcagatgaagtaggtattttcttgtgcactgcacatcccgcgaaatttaaagcatccgtagaacgtattcttggtattcagcttccattacctgaaacactggataaacataatcagctaccattgctttctgatgaaatggataatgattttgcacaactacgggcttacttattgaagtcataa

SEQ ID NO: 156 - protein, 425 aa, Haemophilus influenzae
MNLYNIKHPEEQVTFSQAVRQGLGRDQGLFFPEVIPQLNNINELLELPVVERSQKILGALIDGELPQATLDAMVKNAFTFPAPLEKVEDNIYALELFHGPTLAFKDFGGRFMAQALAAVRGDGKITILTATSGDTGAAVAHAFYGLENINVVILYPKGKISPLQEKLFCTLGGNIRTVAINADFDACQALVKQAFDDVELRQTIRLNSANSINISRLLAQVCYYFEAVAQLPKEKHDNVVVSVPSGNFGNLTAGLIAKTLGLPIKRFVASTNANDTVPRYLKSGNWDPKTTVVTLSNAMDVSRPNNWPRVEELFKRNGWDLTDLGSGMLSDSETEDTLKAMQSKGYLCEPHGAIAYQVLKDQLKADEVGIFLCTAHPAKFKASVERILGIQLPLPETLDKHNQLPLLSDEMDNDFAQLRAYLLKS

SEQ ID NO: 157 - DNA, 945 bp, Haemophilus influenzae
atgttaagaatttacgcccctgcatctagcgcgaatattagcgtaggtttcgatactttaggtgctgcgatctctcctattgatggttctttgttaggcgatgtggttcaaatagaatctatttcaactggttttgagttagaaagtgcgggctattttgttcgtaaattaccgaaagaaccgcaaaaaaatattgtttaccaagcttatgtgctatttagcgagcaattaaaattacgcggaggaaatgttaaacctttacgtttaacgctcgaaaaaaatatgcctattggctctggtttaggctctagtgcttgttctattgttgctgcattagtggcattaaatcagtttcataatgaacctttttcgaaaatggaattgcttgaaatgatgggagaattggaaggtcgtatttctggttcaatccattatgataacgtcgcaccttgctatcttggcggtgtgcaatttatggtgcaatcgctcggcaatatttgtcaaaaattgccattttttgataattggtattgggtgttagcctatccgggaattgaagtttctactgctgaagctcgtgcaattttaccgaaaagctatactcgacaaaacgtgattgcccatggtcgtcatttaggtggctttgtgcatgcttgccatacccatcaggaaaatcttgccgcgattatgatgaaagatgtcattgccgagccttatcgtgaatctctgttacctaattttgctgaagtaaaacaagctacacgagacttaggcgcacttgccacaggtatttcaggctcagggccaacaattttctctattgcccctgatttacaaactgcaattaaactttcaagttatttagaaagccattatttacaaaataatgaaggttttgtgcatgtatgtaaagttgataacgaaggcacaagagaaattaaataa

SEQ ID NO: 158 - protein, 314 aa, Haemophilus influenzae
MLRIYAPASSANISVGFDTLGAAISPIDGSLLGDVVQIESISTGFELESAGYFVRKLPKEPQKNIVYQAYVLFSEQLKLRGGNVKPLRLTLEKNMPIGSGLGSSACSIVAALVALNQFHNEPFSKMELLEMMGELEGRISGSIHYDNVAPCYLGGVQFMVQSLGNICQKLPFFDNWYWVLAYPGIEVSTAEARAILPKSYTRQNVIAHGRHLGGFVHACHTHQENLAAIMMKDVIAEPYRESLLPNFAEVKQATRDLGALATGISGSGPTIFSIAPDLQTAIKLSSYLESHYLQNNEGFVHVCKVDNEGTREIK

SEQ ID NO: 159 - DNA, 2448 bp, Haemophilus influenzae
atgcgcgtacttaaatttggcggcacttcgcttgcaaatccggaacgtttttcccaagcggcgaaattgatcgaacaagctcatttagaagagcaggctgcaggtgttttatctgcaccagccaaaataaccaaccatctcgtcgccctttctgaaaaagctgcattaaatcaatcaaccgatacgcatttcaacgaagcaatcgaaattttctataacatcatcaacggcttacatacggaaaataatcaattcgacttaaatggcaccaaggcacttattgatgctgaatttgctcaaatcaaaggattattagaagaaatccgtcaggcaggaaaagtagaagatgcagttaaagcgaccattgattgccgtggggaaaaactttctattgcaatgatgaaagcttggtttgaagcgcgtggctatagcgtacatattgtggatcctgtcaaacaattattggcaaaaggcggttatcttgaatcttctgttgaaattgaagaatcaacaaaacgtgttgatgcagcaaatatcgcaaaagataaagtggtgctgatggcaggttttactgcgggtaatgaaaaaggcgagttggtattgctcggtcgtaatggctcagactattctgccgcctgtttagccgcttgtttaggcgcaagtgtatgcgaaatttggaccgatgtggacggcgtttatacttgcgatccgcgtttagtgcctgatgcacgtttattaccaacgctttcttatcgtgaagcgatggaactctcttatttcggcgcgaaagtgattcatcctcgtacgattgggccattgttgccacaaaatattccttgtgtcattaaaaatacaggaaatccttctgcgccaggttcgattattgatggcaatgtgaaatcagaaagtttgcaagttaaaggtatcactaacttggacaatttggcgatgtttaatgtgtcaggccctggtatgcaaggtatggtaggcatggcatctcgcgtattttcagccatgtcaggcgcaggcatttcagttattttaattactcagtcttcgtctgaatatagtattagtttctgtgtgcctgtgaaatctgcagaagtagcgaaaaccgtactagaaacggagtttgctaatgaattaaatgcacatcaattagaatcaattgaagtgattaaagatttatccattatttctgttgtgggcgatggaatgaagcaagcgaaaggcattgctgctcgtttcttctcggcattagcgcaggcaaacattagcattgtggcgattgcacaaggatctagcgaacgttcaatttctgcggttgtgccgcaaaataaagccattgaagcggtgaaggccacccatcaggcgcttttcaataataaaaaagtcgtggatatgtttttagtgggcgttggtggagtaggcggagaattaattgagcaggtaaagcgtcaaaaggagtatctagcaaagaagaatgttgaaattcgagtttgtgctattgcgaattccaaccgtatgttgcttgatgaaaatggattaaatttagaggattggaaaaacgatttagaaaatgcgactcagccatcagattttgatgtattgctttctttcattaaattacatcatgtggtgaatccagtatttgtagattgtacttcagccgaatctgtagcagggctttatgctcgtgcgttaaaagaaggtttccatgtggttacgccaaacaaaaaagcgaatacacgagaattagtttattacaatgagttacgccaaaatgcccaagcaagccagcataaatttttatatgaaaccaatgtaggtgcgggcttgccagttattgaaaatctccaaaacttacttgcagcaggtgatgagcttgaatattttgaagggattttatctggctcgctttcctttatttttggtaagttggaagaaggactttctctttcagaagtaaccgcacttgcgcgtgaaaaaggctttactgagccagatcctcgagatgatctttctggacaagatgtagcacgcaaattattaattcttgctcgtgaagcgggaattgaacttgaactttcagatgttgaagttgaaggtgtattgccaaaaggcttctccgatggaaaatctgcagatgagtttatggcaatgttgcctcagcttgatgaagaatttaaaactcgcgttgccacagctaaagcagaaggcaaagtattgcgttatgttggaaaaattagtgaaggaaaatgcaaagtatccatcgttgcggtagatctgaataatccactttataaagtgaaagatggtgaaaatgccttggcattttatactcgttattatcaaccgattccacttttattacgtggttatggcgcaggtaatgcagttactgcggcaggtatctttgcagatattttaagaacattacaacattaa

SEQ ID NO: 160 - protein, 815 aa, Haemophilus influenzae
MRVLKFGGTSLANPERFSQAAKLIEQAHLEEQAAGVLSAPAKITNHLVALSEKAALNQSTDTHFNEAIEIFYNIINGLHTENNQFDLNGTKALIDAEFAQIKGLLEEIRQAGKVEDAVKATIDCRGEKLSIAMMKAWFEARGYSVHIVDPVKQLLAKGGYLESSVEIEESTKRVDAANIAKDKVVLMAGFTAGNEKGELVLLGRNGSDYSAACLAACLGASVCEIWTDVDGVYTCDPRLVPDARLLPTLSYREAMELSYFGAKVIHPRTIGPLLPQNIPCVIKNTGNPSAPGSIIDGNVKSESLQVKGITNLDNLAMFNVSGPGMQGMVGMASRVFSAMSGAGISVILITQSSSEYSISFCVPVKSAEVAKTVLETEFANELNAHQLESIEVIKDLSIISVVGDGMKQAKGIAARFFSALAQANISIVAIAQGSSERSISAVVPQNKAIEAVKATHQALFNNKKVVDMFLVGVGGVGGELIEQVKRQKEYLAKKNVEIRVCAIANSNRMLLDENGLNLEDWKNDLENATQPSDFDVLLSFIKLHHVVNPVFVDCTSAESVAGLYARALKEGFHVVTPNKKANTRELVYYNELRQNAQASQHKFLYETNVGAGLPVIENLQNLLAAGDELEYFEGILSGSLSFIFGKLEEGLSLSEVTALAREKGFTEPDPRDDLSGQDVARKLLILAREAGIELELSDVEVEGVLPKGFSDGKSADEFMAMLPQLDEEFKTRVATAKAEGKVLRYVGKISEGKCKVSIVAVDLNNPLYKVKDGENALAFYTRYYQPIPLLLRGYGAGNAVTAAGIFADILRTLQH

SEQ ID NO: 161 - DNA, 714 bp, Haemophilus influenzae
atgaatatccagcataatctcaacctaattcagcaaaaaattgaaacggcttgtaaagaagaaaatcgcaatcaaaataccgtaaaattacttgccgtatctaagaccaaacctatttctgctattctttcggcttatcaagcgggacaaacggcttttggggaaaattacgtgcaagagggggtagaaaagatccaatattttgagtctcaaaatataaaccttgaatggcattttatcggcccattacaatcgaataaaacccgtctcgttgcagaacattttgattggatgcaaacgcttgatcgagcaaaaattgcagatcgtttaaatgaacaacgaccgaccaacaaggctccattgaatgtattgattcagattaatatcagcgatgaagaaagtaaatcaggtattcaacctgaggaaatgctaacactagcaaaacacatcgaaaatttaccgcacttatgcctacgtggcttaatggcaatacccgcaccaaccgataaaatcgctgaacaagaagccgtgttcagaaaaatgtcagacctatttgaacaacttaaacaagtcttacccaatcaacaaattgatacactttctatgggaatgacggatgatatgccgagcgcaataaaatgcagttctacaatggtacgcattggcacttcgatttttggtgcgagaaattattcaacatcacaaaataaataa

SEQ ID NO: 162 - protein, 237 aa, Haemophilus influenzae
MNIQHNLNLIQQKIETACKEENRNQNTVKLLAVSKTKPISAILSAYQAGQTAFGENYVQEGVEKIQYFESQNINLEWHFIGPLQSNKTRLVAEHFDWMQTLDRAKIADRLNEQRPTNKAPLNVLIQINISDEESKSGIQPEEMLTLAKHIENLPHLCLRGLMAIPAPTDKIAEQEAVFRKMSDLFEQLKQVLPNQQIDTLSMGMTDDMPSAIKCSSTMVRIGTSIFGARNYSTSQNK

SEQ ID NO: 163 - DNA, 1137 bp, Haemophilus influenzae
atgaaatttgtgattgcacctgattcttttaaagaaagtttgaccgcacttgaagtagctaccgccattgaaacaggcttcaaacgtgtattccccgatgcggactatgtaaaattgccaatggcagatgggggcgaaggtacagttcaatcccttgtggatgccacgcaaggcaagctcattgaatgtgaagtcaccgcacctttgggtgacaaagtgaaaagtttcttcggtttatcgggagatggaaaaaccgcgattatcgaaatggcagcagcttctggtttacatcttgttccgcctgaaaaacgcaatcccttgcttaccaccagttacggcacaggggagttgattaaactggcattagatttaggcgtagagagtttcattcttggcattggcggtagcgcaaccaacgatggtggtgtaggaatgttgcaagcactagggatgcaatgtttagattcgcaagataagcctatcggttttggtggagcagagctagcaaatattgtgaagattgacgttcaacaattagatccacgtttgcaacaagttcacattgaagtagcgtgcgatgtgaataatccgctctgtggtgaatgtggtgcatctgccatttttggaccacaaaaaggcgcaacgcctgaaatggtgaaacaacttgatgctgcactttcgcattttgctgaaattgccgaacgcgattgcggtaaacaaattcgtgatcaggctggcgcaggtgctgctggtggtatgggtggtggcttgctattattaccaagcgtacaactgaaagcaggcatacaaattgtgttagaccggttacatttaattgattatgtaaaagatgctgatgtagtgattacgggtgaagggcgaatagatgcacaaagtattatgggtaaaacgccaattggtgtggcacgtacggcaaaacagttcaataagccagtgatcgccatcgcagggtgtttgcgtgaagattatgatgtggtgtttgatcacggtattgatgcggtgttccctattattcaccaacttggcgatttatcggatattctcaaacaaggcgaacaaaatttaatttctaccgctcaaaatgtggcgagagtactggcatttaaatttcattaa

SEQ ID NO: 164 - protein, 378 aa, Haemophilus influenzae
MKFVIAPDSFKESLTALEVATAIETGFKRVFPDADYVKLPMADGGEGTVQSLVDATQGKLIECEVTAPLGDKVKSFFGLSGDGKTAIIEMAAASGLHLVPPEKRNPLLTTSYGTGELIKLALDLGVESFILGIGGSATNDGGVGMLQALGMQCLDSQDKPIGFGGAELANIVKIDVQQLDPRLQQVHIEVACDVNNPLCGECGASAIFGPQKGATPEMVKQLDAALSHFAEIAERDCGKQIRDQAGAGAAGGMGGGLLLLPSVQLKAGIQIVLDRLHLIDYVKDADVVITGEGRIDAQSIMGKTPIGVARTAKQFNKPVIAIAGCLREDYDVVFDHGIDAVFPIIHQLGDLSDILKQGEQNLISTAQNVARVLAFKFH

SEQ ID NO: 165 - DNA, 1260 bp, Haemophilus influenzae
atgacaacagtctcagcaataggtgcgttggtggcgttaatcgttgctatcttcctcattttgaaaaaagtctcaccagcttatggtatgttggtgggagctttggttggaggcttaattggtggtgcggatttatcgcaaacagtgagcctaatgatcggtggcgcacagggtattactactgcagttatgcgtatcttagctgctggtgtgttggcaggcgtgctgattgaatcgggtgcagcaaattccatcgcggaaaccattactaataaattgggtgaaactcgagctttactcgccttggcactagcgacgatgattttaactgcggtgggtgtgttcgtggatgtggcagtgattactgtttcaccaattgctttagcgttatcgcgtcgcagcgatttatcgaaagctgcaattttgctcgccatgattggcggtggtaaagctggtaatattatgtcgccaaacccaaatgccattgcggcagcagatacttttcatttgccactcacttccgtgatgatggctggtataattcccgcgctatttggtttgattctcacctacttcttagcaaaacgcttaatcaacaaaggttctaaagtgactgacaaagaggtaatcgtgcttgaaacgcaaaatttaccttcatttctgaccgcacttgtcgcacctttagtggcaattttgctattggcacttcgtccattgtttgatattaaagttgatccattaattgcattgccgttaggtggtttgattggtgcgctttgtatgggcaaacttcgcaatataaatagttatgctatcaatggattgagtaaaatgacacccgtggcaattatgttacttggtacaggcgcgcttgctggcatcattgctaattctggtttaaaagaagtattgattcaaggtttggaacattcaggtttgccatcatacattcttgcaccaatttcaggggtgttgatgtctttagcgacagcttctaccacggcaggtactgcggtggcatccaatgtgttcagtagtaccttgttagaacttggagttagcagtcttgctggtgcagcaatgattcatgcaggggcgaccgtatttgatcatatgccacatggttctttcttccatgctacaggcggtagtgtgaatatggatatcaaagaacgtttaaaacttattccttatgaaagtgcggtcggtttgatgatgaccatcgtttctaccttaatttttggcgtatttaaattctag

SEQ ID NO: 166 - protein, 419 aa, Haemophilus influenzae
MTTVSAIGALVALIVAIFLILKKVSPAYGMLVGALVGGLIGGADLSQTVSLMIGGAQGITTAVMRILAAGVLAGVLIESGAANSIAETITNKLGETRALLALALATMILTAVGVFVDVAVITVSPIALALSRRSDLSKAAILLAMIGGGKAGNIMSPNPNAIAAADTFHLPLTSVMMAGIIPALFGLILTYFLAKRLINKGSKVTDKEVIVLETQNLPSFLTALVAPLVAILLLALRPLFDIKVDPLIALPLGGLIGALCMGKLRNINSYAINGLSKMTPVAIMLLGTGALAGIIANSGLKEVLIQGLEHSGLPSYILAPISGVLMSLATASTTAGTAVASNVFSSTLLELGVSSLAGAAMIHAGATVFDHMPHGSFFHATGGSVNMDIKERLKLIPYESAVGLMMTIVSTLIFGVFKF

SEQ ID NO: 167 - DNA, 960 bp, Haemophilus influenzae
ttggcgttgcgggaaaatcgtgtggtagagattgatcaagcgttggcacaaaaatggaattttgaagcgcaaccagggattaatttaccgattcattatttaggcaaaaatattggagtggtggggatttctggtgagccaactcaggtgaaacaatatgccgaactagtgaaaatgacggcagaacttattgtggaacaacaggctttactcgaacaagaaagctggcatcgtcgttacaaagaagaatttattttacaattattacattgcaatttgaattggaaagagatggaacagcaggcgaaatttttttcttttgatttaaataaatctcgtgtggttgtattgattaagttacttaattcagccctggataatttacagcatctgatcaattatttggaacagtctgaatttgcacaggatgtggcaattttgtcccttgatcaggttgtggtcttaaagacttggcaaaactccaccgtactttctgctcaaatgaaaacgcttttacctgcagattattcaaaacaagattataaaattgctgtaggcgcttgtctaaatctaccgctttttgagcagcttcccttgtcttttcaaagtgcgcaaagcacgctttcttatggattaaaacatcatccacgcaaaggtatttatgtgtttgatgagcatcgattgcctgtgttacttgctggattatcccattcttggcaagggaacgaattgataaaacccctttcaccccttttctcagaagaaaatgcgacactttataaaacccttcaacaatattttttatcaaattgtgatctttatctcactgcggaaaaattatttgttcacccgaatactttgcgttatcgattgaacaaaatagagcaaataactggtttatttttcaataagatagatgataaattaacgctctatctcggaacgttgttagaacattga

SEQ ID NO: 168 - protein, 319 aa, Haemophilus influenzae
MALRENRVVEIDQALAQKWNFEAQPGINLPIHYLGKNIGVVGISGEPTQVKQYAELVKMTAELIVEQQALLEQESWHRRYKEEFILQLLHCNLNWKEMEQQAKFFSFDLNKSRVVVLIKLLNSALDNLQHLINYLEQSEFAQDVAILSLDQVVVLKTWQNSTVLSAQMKTLLPADYSKQDYKIAVGACLNLPLFEQLPLSFQSAQSTLSYGLKHHPRKGIYVFDEHRLPVLLAGLSHSWQGNELIKPLSPLFSEENATLYKTLQQYFLSNCDLYLTAEKLFVHPNTLRYRLNKIEQITGLFFNKIDDKLTLYLGTLLEH

SEQ ID NO: 169 - DNA, 321 bp, Haemophilus influenzae
atgagtgaattacttattaatgactatacaagaaaaggttttgttgatggtctctgtgttcgcctgcccacaatttgtatccgtccaggaaaaccaaataaagcggcttcttcctttgtaagtagcattattcgagaacctttacatggtgaaacttcaatctgcccagttgctgaaaaaatggcgttcagctttatcaaatttctaggtaagaaaaaggaagaatgggcattagccattacgggctatgtcgtgagtattcctattgtcttaccgattttacttattttcatcaaagctattcttgatttggggaaatga

SEQ ID NO: 170 - protein, 106 aa, Haemophilus influenzae
MSELLINDYTRKGFVDGLCVRLPTICIRPGKPNKAASSFVSSIIREPLHGETSICPVAEKMAFSFIKFLGKKKEEWALAITGYVVSIPIVLPILLIFIKAILDLGK

SEQ ID NO: 171 - DNA, 120 bp, Haemophilus influenzae
gtggcgacattccatatttgtccactaacaaattttgatcacataatttgcgacaaaaatcttgttgaatctgcacagaatggcattagagaattaaatattaatttaactatcgtataa

SEQ ID NO: 172 - protein, 39 aa, Haemophilus influenzae
MATFHICPLTNFDHIICDKNLVESAQNGIRELNINLTIV

SEQ ID NO: 173 - DNA, 756 bp, Haemophilus influenzae
atggcaaaagatgaagtagggcataattttcttgcacgtttgggtaaaacgcgtttgcgtccaggcggtaaaaaagcgacagattggttaattgctaatggcgattttagccaagataaaaaagtgttagaggttgcctgtaatatggggacgactgcaattggattggcgaaacaatttggttgtcatattgaaggtgttgatttagatgaaaatgcgttagcaaaagcacaagcaaatattgaagcaaatggcttgcaagaaaaaattcatgtacagcgtgcgaatgcgatgaagttgcctttcgaggatgaaagttttgatattgtcatcaatgaagcgatgctcacaatgttacccgtggaagcgaagaaaaaagccattgcagaatattttcgagtgttaaaaccaaatggtttattgcttactcacgatgttatgctggtggggaatgatcatcaaactattctagaaaatatgcgcaaagcgattaacgtgactgtcacgccattaacgaaagatggatggaaaggcatattccaagaaagtggctttagaaatgtcgatgctttctctggtgagatgaccttactttctccaaaaggaatgatctatgacgaaggaattttcggtacgttaaaaatcatccgtaatgcgatgaaaacggaaaatcgtgagcaatttaaaagaatgttcaaaacctttaatgatcctgaacataaattacattttattgctgtatgtagccaaaaataa

SEQ ID NO: 174 - protein, 251 aa, Haemophilus influenzae
MAKDEVGHNFLARLGKTRLRPGGKKATDWLIANGDFSQDKKVLEVACNMGTTAIGLAKQFGCHIEGVDLDENALAKAQANIEANGLQEKIHVQRANAMKLPFEDESFDIVINEAMLTMLPVEAKKKAIAEYFRVLKPNGLLLTHDVMLVGNDHQTILENMRKAINVTVTPLTKDGWKGIFQESGFRNVDAFSGEMTLLSPKGMIYDEGIFGTLKIIRNAMKTENREQFKRMFKTFNDPEHKLHFIAVCSQK

SEQ ID NO: 175 - DNA, 282 bp, Haemophilus influenzae
ttggtagaaggtgcaaatcagtatattgttgctggaaatatgtataacggcgacgtagaagatttgaataaaccgcatctttatttgatgtctcaaatggaaaaaccgacaactaaagctgagttgaaatcagcattacaaggctatttaattcaaaatgaatatcaagatatgaataacaatgataaattgattgatgaaacttatgattgcactgagttgtttaatgcactttgtgatgtattaacaagattaggctatatccagcctgtaaacctataa

SEQ ID NO: 176 - protein, 93 aa, Haemophilus influenzae
MVEGANQYIVAGNMYNGDVEDLNKPHLYLMSQMEKPTTKAELKSALQGYLIQNEYQDMNNNDKLIDETYDCTELFNALCDVLTRLGYIQPVNL

SEQ ID NO: 177 - DNA, 999 bp, Haemophilus influenzae
atgcaatttaaacatttcaaacttgctacccttgcggcagcacttgctttttctgctaatagttttgctgatattaccgtttataatggtcagcacaaagaagccgctacggctgtggcaaaagcctttgaacaggaaacaggcattaaagttacgctaaatagcgggaaaagtgagcaacttgcaggtcaattaaaagaagaaggcgataaaacaccagccgatgttttctatactgaacaaacagcgacttttgccgatctttctgaagcagggcttttagcaccaatttcagaacaaaccattcaacaaaccgcacaaaaaggcgtaccacttgcaccgaaaaaagactggattgcattaagtggtcgttctcgcgtagtggtttacgatcacactaaattatctgaaaaagatatggaaaaatcagtgcttgattatgcaacaccaaaatggaaaggcaaaatcggttatgtatcaacttctggcgcgttcttagagcaagttgttgcgttaagcaaaatgaaaggggacaaagttgcgcttaattggttaaaaggtttaaaagagaacggaaaactttacgctaaaaatagtgtggcattacaagcggttgaaaatggcgaagtacctgctgcgttaatcaataactattattggtataacctagcaaaagaaaaaggcgtggaaaacctaaaaagccgtctttattttgttcgccaccaagatccaggtgcgttagttagctattcaggtgcagcagtattgaaagcctctaaaaatcaagctgaagcacaaaaattcgttgatttcttagcgagtaaaaaaggtcaagaagcattagtggcagcgcgtgcagaatatccgttacgtgctgatgtggtttcgccatttaatcttgaaccttatgaaaaattagaagcaccagtggtgtccgcaacaacagctcaagataaagaacatgcgatcaaattaattgaagaagctggattgaaataa

SEQ ID NO: 178 - protein, 332 aa, Haemophilus influenzae
MQFKHFKLATLAAALAFSANSFADITVYNGQHKEAATAVAKAFEQETGIKVTLNSGKSEQLAGQLKEEGDKTPADVFYTEQTATFADLSEAGLLAPISEQTIQQTAQKGVPLAPKKDWIALSGRSRVVVYDHTKLSEKDMEKSVLDYATPKWKGKIGYVSTSGAFLEQVVALSKMKGDKVALNWLKGLKENGKLYAKNSVALQAVENGEVPAALINNYYWYNLAKEKGVENLKSRLYFVRHQDPGALVSYSGAAVLKASKNQAEAQKFVDFLASKKGQEALVAARAEYPLRADVVSPFNLEPYEKLEAPVVSATTAQDKEHAIKLIEEAGLK

SEQ ID NO: 179 - DNA, 93 bp, Haemophilus influenzae
gtgcgtgtatttgaaaaaattcacgcacgcgtttacaattctctaacaaaattaaccgcttgcgtgcgtgaactgaaaggttcacattcctaa

SEQ ID NO: 180 - protein, 30 aa, Haemophilus influenzae
MRVFEKIHARVYNSLTKLTACVRELKGSHS

SEQ ID NO: 181 - DNA, 1521 bp, Haemophilus influenzae
ttgcctcgcagaccgccattctggctcactttacttatcatcttaatcgggcttccgttatgtttgccgtttctgtatgtcattttgcgtgcgacagaagtgggattaacgcgaagtgttgagctattgtttcgccctcgaatggctgaattattaagcaatacaatgcttttaatggtttgtgtaactattggtgctatttcacttggtacgctttgtgcttttttacttgaacgttatcgctttttcggtaaagctttttttgaagtggcgatgacgttacccctttgtattcccgcctttgtaagttgttttacttggatcagcctcacattccgcgttgagggtttttggggaacaattggtattatgacattaagttcatttcctttggcttatttgcccgtttccgccatactaaaaagacttgatcgttctcttgaagaagtaagcctttcgcttggtaaaagccctgtgtataccttttggtatgctatttttccgcaacttaaacccgccattggtagtagtatcttactgattgctttacatatgttggtcgaatttggtgcagtgtcaattttaaattatcaaacctttaccactgccattttccaagaatatgaaatgtcttttaacaacagcactgctgcattattatctgccgttttaatggcgatttgtatacttattgtttttggggaaattttctttcgtggaaaacaaacactttaccacagtggaaaaggtgttatgcgtccttatctcgtaaaaacactttcctttggaaaacaatgtttaaccttcggatttttctctagcatattcattttaagcattggcgtgcctgtgattatgttaatttactggcttattgtgggaacttcactcgaaagtgcgggtgatttttcagaatttttatcggcattcagcaattcatttatcatttcaggcttaggcgcattgcttaccgtaatgtgcgccttgccattagtttgggcagctgttcgttaccgtagttatttaacgatttggatcgaccgcttgccatatctattgcacgctgtgccaggcttagtcattgccttatcattagtctatttttccatccattacgctaacgacctatatcaaaccttttttgtgattatcattgcctactttatgctctatttgccaatggcacaaactacattaagagcgtctttagagcaactttccgatcaaattgaaaaagtcggacaaagtcttgggcgaaaccctttctatatttttcgcaccttgacgctaccagccatattacccggtgtggcagccgcatttgctttggtttttttgaatttaatgaaagagcttaccgcgacgcttttgctcacatcaaatgatattaaaaccttatccattgctgtgtgggaacataccagcgatgcacaatatgctgccgccaccccttatgcgttaatgctcgttcttttttcgggtattcctgtatttttattgaaaaaatatgcgtttaaataa

SEQ ID NO: 182 - protein, 506 aa, Haemophilus influenzae
MPRRPPFWLTLLIILIGLPLCLPFLYVILRATEVGLTRSVELLFRPRMAELLSNTMLLMVCVTIGAISLGTLCAFLLERYRFFGKAFFEVAMTLPLCIPAFVSCFTWISLTFRVEGFWGTIGIMTLSSFPLAYLPVSAILKRLDRSLEEVSLSLGKSPVYTFWYAIFPQLKPAIGSSILLIALHMLVEFGAVSILNYQTFTTAIFQEYEMSFNNSTAALLSAVLMAICILIVFGEIFFRGKQTLYHSGKGVMRPYLVKTLSFGKQCLTFGFFSSIFILSIGVPVIMLIYWLIVGTSLESAGDFSEFLSAFSNSFIISGLGALLTVMCALPLVWAAVRYRSYLTIWIDRLPYLLHAVPGLVIALSLVYFSIHYANDLYQTFFVIIIAYFMLYLPMAQTTLRASLEQLSDQIEKVGQSLGRNPFYIFRTLTLPAILPGVAAAFALVFLNLMKELTATLLLTSNDIKTLSIAVWEHTSDAQYAAATPYALMLVLFSGIPVFLLKKYAFK

SEQ ID NO: 183 - DNA, 1071 bp, Haemophilus influenzae
atgcgtttaaataaaatgataaataatccgttactaaccgttaaaaatctcaataaattttttaatgaacaacaagttctgcacgatatttcattcagcttacaacgcggagaaatcctctttttacttggtgcttcaggctgtggcaaaactacattattacgtgccattgcaggttttgaacaaccctctaatggcgaaatttggctaaaagagcggttaatttttggcgagaattttaatcttccaacgcaacaacgccatctcggttatgtggtgcaagagggcatactttttcctcacttaaatgtctatcgcaacattgcttacggattaggcaacggcaaaggaaaaaatagcgaagaaaaaacgcggattgaacaaataatgcaactaacgggtatttttgaactggcggatcgctttccacatcaactttcaggcggacaacaacaacgcgtagcattggcgcgtgctttagcccctaatccagaactgattttattagacgagcctttcagtgccttagacgagcatcttcgccaacaaattcgccaagagatgctccaagcacttcgccaaagcggtgcttccgcaattttcgttactcacgaccgtgatgaagccttacgctacgctgataaaatcgccattattcagcaaggtaaaattttacaaatcgatacgcctcgcaccctttattggtcgcctaatcatcttgaaacagcaaaatttatgggggaaagtattgttttgcctgcaaatctactcgatgaaaataccgctcaatgccaattaggcaatattcctataaaaaataaatcaatctcacaaaatcaaggtaggattttgcttcgtccagaacaatttagcctgtttaaaacatcagaaaatccaaccgcactttttaatggacaaataaaacaaattgaatttaaaggaaaaattacctccattcaaattgaaattaatggctacgcaatatggattgagaacgttatttctcccgatttatctattggcgataatttgcctgtttatttacataaaaaagggcttttttacgcttaa

SEQ ID NO: 184 - protein, 356 aa, Haemophilus influenzae
MRLNKMINNPLLTVKNLNKFFNEQQVLHDISFSLQRGEILFLLGASGCGKTTLLRAIAGFEQPSNGEIWLKERLIFGENFNLPTQQRHLGYVVQEGILFPHLNVYRNIAYGLGNGKGKNSEEKTRIEQIMQLTGIFELADRFPHQLSGGQQQRVALARALAPNPELILLDEPFSALDEHLRQQIRQEMLQALRQSGASAIFVTHDRDEALRYADKIAIIQQGKILQIDTPRTLYWSPNHLETAKFMGESIVLPANLLDENTAQCQLGNIPIKNKSISQNQGRILLRPEQFSLFKTSENPTALFNGQIKQIEFKGKITSIQIEINGYAIWIENVISPDLSIGDNLPVYLHKKGLFYA

SEQ ID NO: 185 - DNA, 681 bp, Haemophilus influenzae
atgaaattaaccctagaaatgcttacaggaaagtctcgtgagcatttagtcaatttacccacaactcattcatcaaatcattttttgcaaacacaagctatgcaagcatttcaagctttgcaacaaagtgcggcaaaaaatggctttaatttacagcctgcgagcagttttcgtgattttgaacgccaaaaacttatttggaacagtaaatttaagggcgagcgaaaagtacacgatgatgcaggaaaggcattagatttgaaccaattagatgactggcaaaaatgtcaggcgattttacgttggtctgcattgccgggggcgagccgtcatcattggggaacggaagtggatatttttgatcctgatcttttgccacaagggcaatctttacaactggagccttgggaatatgaaaaaggcggctacttctttgaattgagtgaatttcttgccgaaaatttaccgcactttgattttgctttgccttttatgaatatgcagtccaataagaaagtggggcgggagccttggcatatcagttatttgccgttagctgaattggcaagccagcaattttctccagagattttgcaacaggcgtggaaaggggaaaatattttaggcacagactgtttaatatcacatcttgaacaaattttttccgaatatattgtttaa

SEQ ID NO: 186 - protein, 226 aa, Haemophilus influenzae
MKLTLEMLTGKSREHLVNLPTTHSSNHFLQTQAMQAFQALQQSAAKNGFNLQPASSFRDFERQKLIWNSKFKGERKVHDDAGKALDLNQLDDWQKCQAILRWSALPGASRHHWGTEVDIFDPDLLPQGQSLQLEPWEYEKGGYFFELSEFLAENLPHFDFALPFMNMQSNKKVGREPWHISYLPLAELASQQFSPEILQQAWKGENILGTDCLISHLEQIFSEYIV

SEQ ID NO: 187 - DNA, 1134 bp, Haemophilus influenzae
atgagagaaaaagtggtttcgttggcacaagatttaattcgtcgcccgtctattagcccgaatgacgaaggctgtcagcaaattattgccgaacgtttagaaaagctaggttttcaaattgaatggatgccttttaatgacacgttgaatttgtgggcaaaacacggaacgagcgagccagttattgcttttgcaggtcatacggatgttgtgcctactggcgatgaaaatcaatggtcgtctccgccgttttctgcggagattattgatggcatgctttatgggcgtggtgcggcggatatgaaaggctcccttgcagcaatgattgtggcggcagaagaatacgtaaaagcaaatcctaatcataaaggcaccattgcattattgattacctctgatgaagaggctgccgcaaaagatggaactatacgcgtggttgagacgttaatggcgcgtgatgaaaaaattacttattgtatggttggagagccatcgagtgctaaaaacttaggcgatgttgtcaaaaatggtcgccgcggctcaattacaggaaatctctatattaaaggtattcaaggacacgtagcctatccgcatttagctgaaaacccaatccataaagcagccccattcttgcaagaattaacgacttaccaatgggataaaggcaatgaatttttcccgccaacaagcctacaaattgctaacattcacgcaggtacgggaagtaataatgtaattcctgctgaattatatattcagtttaatttgcgttattgcacagaagtcacggatgaaatcattaagcaaaaagtcgctgaaatgctagaaaaacacaatttgaaatatcgtattgaatggaatttatcaggcaaaccctttttaacaaaaccaggtaaattattagattcgataacctccgctattgaggaaaccataggcataacgccaaaggctgaaacaggtggtggcacgtcagacggtcgttttattgcattgatgggcgcagaagtagtggaatttggtccgttaaattcaaccattcataaagtcaatgaatgtgtcagtatagaagatcttggcaagtgcggtgaaatttatcacaaaatgttagtgaatttattggatagctaa

SEQ ID NO: 188 - protein, 377 aa, Haemophilus influenzae
MREKVVSLAQDLIRRPSISPNDEGCQQIIAERLEKLGFQIEWMPFNDTLNLWAKHGTSEPVIAFAGHTDVVPTGDENQWSSPPFSAEIIDGMLYGRGAADMKGSLAAMIVAAEEYVKANPNHKGTIALLITSDEEAAAKDGTIRVVETLMARDEKITYCMVGEPSSAKNLGDVVKNGRRGSITGNLYIKGIQGHVAYPHLAENPIHKAAPFLQELTTYQWDKGNEFFPPTSLQIANIHAGTGSNNVIPAELYIQFNLRYCTEVTDEIIKQKVAEMLEKHNLKYRIEWNLSGKPFLTKPGKLLDSITSAIEETIGITPKAETGGGTSDGRFIALMGAEVVEFGPLNSTIHKVNECVSIEDLGKCGEIYHKMLVNLLDS

SEQ ID NO: 189 - DNA, 345 bp, Haemophilus influenzae
atgattacagtttacggcattaaaaattgcgatacagtgaagaaagcgttgaaatggctggcggatcacaatatcgaacacaaacttcacgactaccgtgttgatgggttagatttgaattttttaacccaagcggaaactcaatttggctgggatgtgttagtgaataaacgcagtacaacttggcgtaatttggatgagcaagttaaaaattcccttgataaaaccaccgcactttccgtgttggctgagaatccaactttaattaaacgcccaattattttacaagatgaaaaggcattaattggctttaatgaaaaggaatatcaggctgtttttgcttaa

SEQ ID NO: 190 - protein, 114 aa, Haemophilus influenzae
MITVYGIKNCDTVKKALKWLADHNIEHKLHDYRVDGLDLNFLTQAETQFGWDVLVNKRSTTWRNLDEQVKNSLDKTTALSVLAENPTLIKRPIILQDEKALIGFNEKEYQAVFA

SEQ ID NO: 191 - DNA, 1881 bp, Haemophilus influenzae
atgtcacaaaatcaagaaactcgcggcttccaatctgaagtcaaacaactactccaattaatgattcattctttgtactctaacaaagaaattttcttacgtgaattgatttctaatgcttctgatgcggcagataaattacgctttaaagcactttccaacccagctttatatgaaggcgatggcgacttgcgtgtgcgtgttagctttgatgcggataaaggcattatcacaattagcgataacggcattggtatgacccgtgagcaagtcatcgatcatttgggtacgattgcaaaatcaggaacaaaagaatttttaaccgcacttggtcaagatcaagcaaaaaatagccagcttattgggcagtttggcgtgggtttttattctgcttttattgtggcagataaagtgactgtaaaaactagagcagctggcgaagaggcggataaagctgtactttgggaatctgcgggcgaaggcgaatattctgtggcggatattgagaaaaaatcccgtggcacagatgtgattttgcacttacgtgaagatgaaaaagaatttttaaatgaatggcgtttgcgtgaaattatcggtaaatattctgaccatattggcttgccagtggaaatgctgacgaaagaatacgatgatgaaggcaaagagtgcggtgagaaatgggagaaaattaataaatctgatgccctttggacgcgttctaaaaatgatgtgtccgatgaggaatacaaagcgttttacaaacacttaagccatgattttgttgatcctgtgacttgggcgcataacaaagttgagggaaatcaagcatatactagtttgctttatgtaccagctaaagcaccttgggatttatttaatcgagaacataaacacggcttaaaactttatgttcaacgcgtatttattatggatgatgcggagcaatttatgccgaattatctacgttttatgcgtggtttaatcgatagtaatgatttgccattaaatgtatctcgtgaaattttacaggataacaaaattacggctgcactacgcaaagcattaactaagcgttcattacaaatgctagaaaaattagcaaaagatgatgcagaaaaatatcttaaattctggaaagagtttggtttagtcttaaaagaaggccctgcagaagattttgctaacaaagaaactatcgcaaagttattgcgttttgcttcgacacataatgatggtagtgagcaaactgtctctttagaagattacatcttgcgtatgaaagaggggcaaaaagctatctattacattacagcggatagttatgttgcagcgaaaaatagcccacacttggaattattcaataaaaaaggcattgaggttttattactttccgatcgtattgatgaatggatgttaagctatttaactgaatttgacggtaaacaattacaaagtatcacgaaagcagatttggatttaggcgatttagcggataaagaatctgaaacacaaaaacaacaagataaagcctttggtagttttattgagcgtgtgaaaaacttgcttggcgaacgtgtgaaaacggtgcgtttaactcacaatttaacggatacaccagcggtggtttctacggataacgatcaaatgacgacccaaatggcgaaattgtttgcagccgcagggcaacctgtaccagaagtaaaatacacatttgaactgaatccagaacactatttagtgaaaaaagtggctgatattgcagatgaaactgaatttgctgattgggtggaactgttgcttgaacaagctatgttagcagagcgcggatctttggaaaatccagctgcgtttattaaacgtatcaataagttgttaggttaa

SEQ ID NO: 192 - protein, 626 aa, Haemophilus influenzae
MSQNQETRGFQSEVKQLLQLMIHSLYSNKEIFLRELISNASDAADKLRFKALSNPALYEGDGDLRVRVSFDADKGIITISDNGIGMTREQVIDHLGTIAKSGTKEFLTALGQDQAKNSQLIGQFGVGFYSAFIVADKVTVKTRAAGEEADKAVLWESAGEGEYSVADIEKKSRGTDVILHLREDEKEFLNEWRLREIIGKYSDHIGLPVEMLTKEYDDEGKECGEKWEKINKSDALWTRSKNDVSDEEYKAFYKHLSHDFVDPVTWAHNKVEGNQAYTSLLYVPAKAPWDLFNREHKHGLKLYVQRVFIMDDAEQFMPNYLRFMRGLIDSNDLPLNVSREILQDNKITAALRKALTKRSLQMLEKLAKDDAEKYLKFWKEFGLVLKEGPAEDFANKETIAKLLRFASTHNDGSEQTVSLEDYILRMKEGQKAIYYITADSYVAAKNSPHLELFNKKGIEVLLLSDRIDEWMLSYLTEFDGKQLQSITKADLDLGDLADKESETQKQQDKAFGSFIERVKNLLGERVKTVRLTHNLTDTPAVVSTDNDQMTTQMAKLFAAAGQPVPEVKYTFELNPEHYLVKKVADIADETEFADWVELLLEQAMLAERGSLENPAAFIKRINKLLG

SEQ ID NO: 193 - DNA, 840 bp, Haemophilus influenzae
gtgcattcccccactcctttcgcactagccatttttttgggaattttgtaccatatcccaactttttccaatcaacgatccattatgaataatcttgaacttgaacaactcattaatcaaaaactttcttccgataaaatcaatgactatgcgcccaacggcttacaagtcgaagggaaaacagaaatcaaaaaaatcattactggcgtaacggcgagtcaggctttaattgattacgcaatcagccaaaatactgatgctattttggttcatcatggctatttttggaaaagtgaaaacccttgtattcgaggaatgaaaggcaagcgaattaaagcccttttagtgaacgacattaatttatatggctatcatttgccattagatgtgcacccagaattaggcaacaacgcacaattagccaaactgctcgacattgaaaatttacaaccattagaaaaaggctctgtgagtattcctgtttggggcgaattaaaagaaccgatgacaggtaaagactttgcagaaaaaatagaaaaagtgttaaatcgaaaaccgttaatttgcattgaaaacggaccgcacttaatccgaaaaattggcatctgcactggtggcggacaaggttatattgatcttgctgcagaacaaggctgcgacgcatttattacaggggaagtgtcagaacaaacgattcattctgcccgtgagcaaggattgcatttcttctctgcaggtcatcacgcaacagaacgctatggcatcaaggcattaggcgaatggttggcgaaagaatatgactttgacgtagaatttaaagatatagataatccagcgtaa

SEQ ID NO: 194 - protein, 279 aa, Haemophilus influenzae
MHSPTPFALAIFLGILYHIPTFSNQRSIMNNLELEQLINQKLSSDKINDYAPNGLQVEGKTEIKKIITGVTASQALIDYAISQNTDAILVHHGYFWKSENPCIRGMKGKRIKALLVNDINLYGYHLPLDVHPELGNNAQLAKLLDIENLQPLEKGSVSIPVWGELKEPMTGKDFAEKIEKVLNRKPLICIENGPHLIRKIGICTGGGQGYIDLAAEQGCDAFITGEVSEQTIHSAREQGLHFFSAGHHATERYGIKALGEWLAKEYDFDVEFKDIDNPA

SEQ ID NO: 195 - DNA, 1389 bp, Haemophilus influenzae
atgtttgagaatttatcggatcgcctttccaaaaccttacgtaatatcacaggaaaaggccgtttaacggaagataatattaaagaaaccttacgcgaagtgcgtatggcattacttgaagccgatgttgccttgcctgtggtgcgtgaatttatcgcaaaagtaaaagaaagcgcgcttggggaagaagtcaataaaagtttaacgccggggcaagaattcttaaaaatcgttcagcgtgagcttgaaaaagccatgggcgaagccaatgagagtttaaatcttgcaacccaaccaccagcagttatcttaatggcaggtttacaaggtgcgggtaaaaccaccagtgtgggtaaattggcaaaattcttgcgtgaacgccataaaaagaaagtgttagtggtgtctgctgacgtatatcgccctgctgcgattaagcaacttgaaaccttggctcaatccgttggcgtggatttttttccatcggatgttaaacaaaaccccgttgatattgctaaagcggcacttgctgatgcaaaactgaaattctacgatgtgttgattgtggatacggcaggtcgcctacacgttgatacagaaatgatggacgaaatcaagcaagtccatgctgcattaaatccaatcgaaactcttttcactgttgatgcgatgacaggtcaagatgcggcaaatacagcaaaagcctttaatgaagcattaccgcttacgggtgttattttgacgaaagtggacggtgatgcgcgcggtggtgcggcgttatcgattcgtcaaatcacaggtaaaccaatcaaattcttgggtgtgggcgagaaaacagaggcacttgagcctttccatcctgatcgtgttgcttcccgtattttgggcatgggcgatgtgctttcccttatcgaagatcttgaacgttctgttgatcgtgaaaaagcggaaaaaatggcgcagaaattcaagaaaggcgatgatttcactttagatgatttccgcgaacagctgatcgaaatgaaaaaaatgggtggcatgatgtctatgcttgagaaattaccaggtgcaaaaaatttgcctgatcacgttaaaaatcaagtagatgacaaaatgtttatcaaaatggaagcgatcattaactccatgaccctaaaagaacgtgccaacccagatattatcaaaggatctcgccgtcgtcgtattgcattaggctctggcactcaagtgcaagatgtcaataaattacttaaacaattcgatgaaatgcaacgtatgatgaagaaaatgcgtaaaggcggcatggctaaaatgatgcgaggaatgcaaggcttaatgggcggaggcttaggcggtcttggcggtttaggcggaatgtttaaacgataa

SEQ ID NO: 196 - protein, 462 aa, Haemophilus influenzae
MFENLSDRLSKTLRNITGKGRLTEDNIKETLREVRMALLEADVALPVVREFIAKVKESALGEEVNKSLTPGQEFLKIVQRELEKAMGEANESLNLATQPPAVILMAGLQGAGKTTSVGKLAKFLRERHKKKVLVVSADVYRPAAIKQLETLAQSVGVDFFPSDVKQNPVDIAKAALADAKLKFYDVLIVDTAGRLHVDTEMMDEIKQVHAALNPIETLFTVDAMTGQDAANTAKAFNEALPLTGVILTKVDGDARGGAALSIRQITGKPIKFLGVGEKTEALEPFHPDRVASRILGMGDVLSLIEDLERSVDREKAEKMAQKFKKGDDFTLDDFREQLIEMKKMGGMMSMLEKLPGAKNLPDHVKNQVDDKMFIKMEAIINSMTLKERANPDIIKGSRRRRIALGSGTQVQDVNKLLKQFDEMQRMMKKMRKGGMAKMMRGMQGLMGGGLGGLGGLGGMFKR

SEQ ID NO: 197 - DNA, 1263 bp, Haemophilus influenzae
ttggatagcattccccttagtactttatttattattcttattatctgtttagtgttatcagcctatttttctggttctgaaactggactactctccctcaataaatatcgtcttcgttttctatctgaacaaggcaataaaggcgcgaaaaaagcggaaaaactgctagaaaagccagataccttgttaagttttattcttatttttaataaccttgtgaatatcagcgcatctgcaattgcaacagtaattggtatgcgtttatatggcgatgccggcgtggcgattgcaacgggtttgctcactttcgtaatgcttgtattttctgaaatattccccaaaacggtggctgcaatgcacgcagaaaaagtgagctttttttcaagtcatattttaacttcattgcttaaaatcttttatccgctcgtttggttaatgaatatttttactaaatccttgatgcaaatagtagggttaaaacttgatatgcaaaaacaagtaattagtagtgaagaactgcgtagtattgtgtcagaagcgggcgaagcaacaccaaatgaacaacatccacaaatgttgctgtctattttggatatggagacagtcactgttgatgacattatggttccccgcaacgaaatcggcggtataaatattgatgatgattggcgagctattatgcgccagctcaatcacgccgcacacaatcgtgttgtactttataaaagtagccttgatgaacaagtacttggcattttgcgcgtgcgtgaagcattccgcttgctccttgaaaaaaatgaatttaccaaagaaaccttaattcgtgccgcagatgaagtgtatttcattcctgaaagcacgccattaaaaacgcaacttgcaaatttccgtacaaataaagagcgaattggcttagttgtagatgaatacggcgatattaaagggcttgtaactttggaggatattttggaggaaatcgttggggattttaccacttccaccgccccaagcattgacaaagaagtaattcaacagtctgatggttcaatgattatcgatggctccgctaatctacgcgatctcaacaaaatgtttaactgggaattagatacagaagatgcccgtacatttaatggcttaatcctcgaacacttagaggaaatacccgatgaaggcacgatttgcgaaattgatggtttgctaatcactattcttgaagtgggcgataatatgataaaacaggcgaaagtcgtcaaactttaa

SEQ ID NO: 198 - protein, 420 aa, Haemophilus influenzae
MDSIPLSTLFIILIICLVLSAYFSGSETGLLSLNKYRLRFLSEQGNKGAKKAEKLLEKPDTLLSFILIFNNLVNISASAIATVIGMRLYGDAGVAIATGLLTFVMLVFSEIFPKTVAAMHAEKVSFFSSHILTSLLKIFYPLVWLMNIFTKSLMQIVGLKLDMQKQVISSEELRSIVSEAGEATPNEQHPQMLLSILDMETVTVDDIMVPRNEIGGINIDDDWRAIMRQLNHAAHNRVVLYKSSLDEQVLGILRVREAFRLLLEKNEFTKETLIRAADEVYFIPESTPLKTQLANFRTNKERIGLVVDEYGDIKGLVTLEDILEEIVGDFTTSTAPSIDKEVIQQSDGSMIIDGSANLRDLNKMFNWELDTEDARTFNGLILEHLEEIPDEGTICEIDGLLITILEVGDNMIKQAKVVKL

SEQ ID NO: 199 - DNA, 849 bp, Haemophilus influenzae
gtgcggttcttttttgcgcattttttagaaaagatttttataatcctttataggtatattttgatagagcacaaagatatggaacacgaatatcaacgggcggtgactcgcgtgtgcgtacaaacggcactgctcttgttacaacatggggcagaaagtaccgtggtggtgcaaatggcgcagcgtttaggcattgcacttggcgtagaaagtgtagaatgtgcgcttacggcaaatgcagttgtgctgacgaccttatcagataatcattgcattactaccgcacgaaaaaatacagataaaggcattaatatgcaaatggtcacagatgttcagcgcattgtgattgccgttgagcatcatttgtatgagttagagatcgcacaaagaaaactggatcaattaaaaccgcttaaatataaccgatggttagtggtatttatgattggcttatcttgtgcagcattcgcccatttatctggcggcgattggataatttgcggcattacctttgtggcggcagccattgccatgtttgtgcgacaagaattttctaaacggcactataatccccttatcgtcttttccatcacctctttcgtcgcctcgctgatttctggcgtgagcttaaaatataacttaggtaacgatcctcaaattgctttagcgtctagtgtgttattacttgtgccagggtttccgctgattaattctttggcggatatattaaaaggttatgtgaatatgggattaggccgttggacgattgcaactattctcacttttggcgcatgtcttggtattgtattcgctttaagcctattacatattacaacttgggggcattaa

SEQ ID NO: 200 - protein, 282 aa, Haemophilus influenzae
MRFFFAHFLEKIFIILYRYILIEHKDMEHEYQRAVTRVCVQTALLLLQHGAESTVVVQMAQRLGIALGVESVECALTANAVVLTTLSDNHCITTARKNTDKGINMQMVTDVQRIVIAVEHHLYELEIAQRKLDQLKPLKYNRWLVVFMIGLSCAAFAHLSGGDWIICGITFVAAAIAMFVRQEFSKRHYNPLIVFSITSFVASLISGVSLKYNLGNDPQIALASSVLLLVPGFPLINSLADILKGYVNMGLGRWTIATILTFGACLGIVFALSLLHITTWGH

SEQ ID NO: 201 - DNA, 480 bp, Haemophilus influenzae
atgttattagacatcacaatatttatcttgaaattactcgatgatatgctatttgctgcgattccagcggtgggctttgctttagtatttaatgtgccgcccaaagccttaaaatattgcgcaattttagccgcacttgggcatgttacacgcacattattactgcatattaatatgcctattgtatttgcgacattctttgccacttgcgtgattggatttttgggcgtgcatctttcccatcgttatttagcccatcccaaagccttcaccgttgccgcaattatccccatgattcccggtgttcatgcttataaagcaatgatttcaatggtacaaattcatcattttggcttttctgatgctttatttgaacagatgattagttcctttattaataccagttttatcctaggcgcaatagtatttggattagcgttaccaggcttattgttttatcgacaaaaacctgtggtgtaa

SEQ ID NO: 202 - protein, 159 aa, Haemophilus influenzae
MLLDITIFILKLLDDMLFAAIPAVGFALVFNVPPKALKYCAILAALGHVTRTLLLHINMPIVFATFFATCVIGFLGVHLSHRYLAHPKAFTVAAIIPMIPGVHAYKAMISMVQIHHFGFSDALFEQMISSFINTSFILGAIVFGLALPGLLFYRQKPVV

SEQ ID NO: 203 - DNA, 342 bp, Haemophilus influenzae
atggtaaaaattgagcgtaaggcgacagattctgcgtatcatgaatttacaaaaattcttacttcatccgctcaattaatggcttttttaaatcaatctgattttgtgaaagcgagagctaaagttgaaaatgaaactgttcagcaaattgcctcgcattttaagttttctcaagaaaataatcttaatcaattaattctatcctcttttgatcgtgaagaagtggatcaactttttgtggaatacattcgttatgtgaataatcaagcacgccaaacattaaataatgaattgattacaaaatggaaatcgttatttgaaaaaagaaaaattacggattaa

SEQ ID NO: 204 - protein, 113 aa, Haemophilus influenzae
MVKIERKATDSAYHEFTKILTSSAQLMAFLNQSDFVKARAKVENETVQQIASHFKFSQENNLNQLILSSFDREEVDQLFVEYIRYVNNQARQTLNNELITKWKSLFEKRKITD

SEQ ID NO: 205 - DNA, 1290 bp, Haemophilus influenzae
atgatcgatccaaatttactccgtaataatttagcagaagtcgcagaaaaattaaaagtaaaacgtaactttatgcttgatacggaaaaactcaccgcgttagaagatcagcgcaaaaacttacaagtcactaccgaaaacttacaagcggaacgtaatgctcgttccaaagccattggtgctgctaaagcgcgtggtgaagatatcgcaccattattggcagaaatggatgatatgggcaatcaattgactgaagcaaaagcacaattagatgcggtacttgcagaaatcaatcaaattgcattaagtattccaaatctacccgcagacgaagtgccattaggcaaagatgacacagaaaataaagaaatcttatgttggggtacaccgcgtacatttgattttgaagtgaaagatcatgtcactttgggtgaagaagcaaatggcttagattttgctgctggggctaaattaactggtgcgcgtttcgccgtgatgaaaggtcaaatcgctaaaatgcaccgtgcattggcacaattcatgttagatcttcatactgaacaacacggctatttagaaacctatgtgccttatttagtaaatcacgccacactttatggaacagggcaattaccaaaattcggggaagatttattccatactttagccttacaaggcgaacaaccttacgcattaattccaaccgcagaagtgccagtcactaatttagtgcgtgatgtaattattgatgaagcagaattaccaataaaaatgaccgcacatacgccatgtttccgttctgaagcaggctcttacggtcgtgatactcgtggtttaattcgtatgcaccaatttgataaagtagaaatggtacaaatcgttgatccagataaatcaatggaagcacttgaagaattaacaggtcatgcggaaaaagtattgcaattattaaatttaccataccgtaaagttttactttgcacaggcgatatgggctttggttcttgcaaaacttacgatttagaagtttgggtgcctgcacaaaatacttatcgagaaatttcttcttgctcaaatatgtgggatttccaagctcgccgtatgcaagctcgctgtaaagcaaaaggcgataagaaaactcgcttagtgcacacattaaatggttcaggcttagcggttggtcgtactttagtagctgtgcttgaaaactatcaaaatgccgatggttcaatcaccgtaccagaagtgctacgtccatatatgggcggattagacgttatcggcaaataa

SEQ ID NO: 206 - protein, 429 aa, Haemophilus influenzae
MIDPNLLRNNLAEVAEKLKVKRNFMLDTEKLTALEDQRKNLQVTTENLQAERNARSKAIGAAKARGEDIAPLLAEMDDMGNQLTEAKAQLDAVLAEINQIALSIPNLPADEVPLGKDDTENKEILCWGTPRTFDFEVKDHVTLGEEANGLDFAAGAKLTGARFAVMKGQIAKMHRALAQFMLDLHTEQHGYLETYVPYLVNHATLYGTGQLPKFGEDLFHTLALQGEQPYALIPTAEVPVTNLVRDVIIDEAELPIKMTAHTPCFRSEAGSYGRDTRGLIRMHQFDKVEMVQIVDPDKSMEALEELTGHAEKVLQLLNLPYRKVLLCTGDMGFGSCKTYDLEVWVPAQNTYREISSCSNMWDFQARRMQARCKAKGDKKTRLVHTLNGSGLAVGRTLVAVLENYQNADGSITVPEVLRPYMGGLDVIGK

SEQ ID NO: 207 - DNA, 630 bp, Haemophilus influenzae
atgaaattatatggtttaattggtgcgtgttcatttgttccacatgtggcattagagtgggtaaaaatacgtgaaaatgctgattatgaatttaaacctgtcactcgtgagttaattaaatcacctgaatttttatcattgaatccacgtggggcagtacctgtattagttgatggcgatttagttctttcgcagaaccaagcgattttgcactatttagatgaactttatcctaattcaaaattatttggtagcaaaaccgtacgtgataaagccaaagcagctcgctggttagcattttttaattccgatgtgcataaatcatttgtgcctctgttccgtttgccaaactatgcaaaagataacgaaacacttgcacacactattcgccaacaagcagtagagcaaattttagatcaacttgcagtcgcaaatgagcatttagaaagtcacatttattttggagaagatatttccgttgcagatgcctatctttacattatgctcaattggtgtcgagcagtgggtatagatttcagccacttaacacaactttcggcttttatgcaacgtgttgagactgatcaagctgtcgaaaatgtaagaaaaattgaagaactaaaagtataa

SEQ ID NO: 208 - protein, 209 aa, Haemophilus influenzae
MKLYGLIGACSFVPHVALEWVKIRENADYEFKPVTRELIKSPEFLSLNPRGAVPVLVDGDLVLSQNQAILHYLDELYPNSKLFGSKTVRDKAKAARWLAFFNSDVHKSFVPLFRLPNYAKDNETLAHTIRQQAVEQILDQLAVANEHLESHIYFGEDISVADAYLYIMLNWCRAVGIDFSHLTQLSAFMQRVETDQAVENVRKIEELKV

SEQ ID NO: 209 - DNA, 2235 bp, Haemophilus influenzae
atgaatattttaattaataaacgtatctttttattagttacccttgtaggtattcaactaaatgtaaccgcaaaacaaaattcttctaattctaatagagaggagttattacctattattgtgaacactaatgatgatagtaataaactacctggtcgttcagtattaaaacagaaaaatatcgaacaacaacaagctgataatgcagcaaatttaattaatatcttgccaggtgtgaatatggctggcgggtttcgccctggtgggcaaacattaaatattaatggaatgggtgacgctgaagatgttagagtgcagttagatggggctacaaaaagttttgaaaaataccaacagggttctatttttattgagcctgaattattaagaagagtaacagtagacaaaggaaattattctcctcaatatggtaatggtggttttgctggaacagtaaaatttgaaactaaggatgctagggatttcttgcaagaaaaccagaaaataggtggttttttaaagtatggaaataatagcaataataaccaaaaaacttatagtactgcactagttttacaaaatgaacaaaaaaatattgatttattattatttggttctgtaagaaatgctggcgattataaaagacccgataatagcaaaattcttttttcaaaaaataatcaaaaaaccggattaataaaattaaattggcaaatttcacccgagcatttactcacattatcgagtgtttatggtattcataaaggctgggagcctttcgcagcaaaaagagatatcctacctaaaccaagtttgagtgatataatacgttatggtactgatatagcgtggaaacgtaaactggtttatcgagatcaaaaagatgaaaattacacattaaaatacaactatctacctgaaaataacccatggattaacttatctactcagttcagctacagtaaaaccacacaaaatgatactcgccacgaaaaagcctcttctgtattttcggctacactcggtaatcaaagctggataacttattcagatcttacttttgatataaataacacaagtacttttaatattaaaagcactcggcatgaactattatttggtttgcaatggttaaaaaacacaagaaatactttaatgtatcacaaggggaagatgaaagatgaaacctataattatggctatttccaacctttttatatgccttctggacgtcaatatacacaggcgttttatttacaagatcaaataaaatggaaaaatataatttttagcacaggagtgcgttatgaccatatcaataatatagggcagaaaaatttagcaccacaatataatgatatatctgtggggcataattatagtcagaaaaattataatggttggtcctattatttaggtcttaagtatgatgtaaaccattatttaagtttatttacgaattttagtagaacttggcgagcacctgttattgatgaacagtatgagacgcaatataagcaagcttctgtatctgcgacttctttaaatttagaaaaagaaatgattaatcaaacgagagtgggtggaattattactctcaatcatctatttcaggaaaatgatgcttttcaatttagaactacttatttttacaatcgcggcaagaatgaaatatttaaaaccagaggagttaattgtgtaggcaatgctgcagataccaataatgatgtttgtcctaaaatcattggaaattatcgtaatttgccaggttatgttattcaaggcgcagagttagaagcttattatcaatccacttatttatttggtgagataacatattcttatgtaaaaggaaaacgtgacacctcaccaagaaacccatggggtaaaacctcaacatggattgcagaaattccccctagaaaggcaactgctactttaggttttaatattcccaaatataattttacagctggctggcgtgctgagtttgtaagaagacaagatcgatcgccattatctggtgatcctaaagcaggatattggtcattgccagcttcaagaggatacagcctacataatctattcctttcttggagccctgcaaaaattaaaggtatgaatgttaagattacagtggataatttattcaatcgagcatacaacccttatctaggcgaattggcttctggaacaggtaggaatatcaaatttagcctatctcagaaattttaa

SEQ ID NO: 210 - protein, 744 aa, Haemophilus influenzae
MNILINKRIFLLVTLVGIQLNVTAKQNSSNSNREELLPIIVNTNDDSNKLPGRSVLKQKNIEQQQADNAANLINILPGVNMAGGFRPGGQTLNINGMGDAEDVRVQLDGATKSFEKYQQGSIFIEPELLRRVTVDKGNYSPQYGNGGFAGTVKFETKDARDFLQENQKIGGFLKYGNNSNNNQKTYSTALVLQNEQKNIDLLLFGSVRNAGDYKRPDNSKILFSKNNQKTGLIKLNWQISPEHLLTLSSVYGIHKGWEPFAAKRDILPKPSLSDIIRYGTDIAWKRKLVYRDQKDENYTLKYNYLPENNPWINLSTQFSYSKTTQNDTRHEKASSVFSATLGNQSWITYSDLTFDINNTSTFNIKSTRHELLFGLQWLKNTRNTLMYHKGKMKDETYNYGYFQPFYMPSGRQYTQAFYLQDQIKWKNIIFSTGVRYDHINNIGQKNLAPQYNDISVGHNYSQKNYNGWSYYLGLKYDVNHYLSLFTNFSRTWRAPVIDEQYETQYKQASVSATSLNLEKEMINQTRVGGIITLNHLFQENDAFQFRTTYFYNRGKNEIFKTRGVNCVGNAADTNNDVCPKIIGNYRNLPGYVIQGAELEAYYQSTYLFGEITYSYVKGKRDTSPRNPWGKTSTWIAEIPPRKATATLGFNIPKYNFTAGWRAEFVRRQDRSPLSGDPKAGYWSLPASRGYSLHNLFLSWSPAKIKGMNVKITVDNLFNRAYNPYLGELASGTGRNIKFSLSQKF

SEQ ID NO: 211 - DNA, 159 bp, Haemophilus influenzae
  misc_feature 12, 13, 14, 15, 16: n is any nucleotide
atgaatgaatgnnnnncttggagccctgcaaaaattaaaggtatgaatgttaagattacagtggataatttawtcaatcgagcatacaacccttatctaggcgaattggcttctggaacaggtaggaatatcaaatttagcctatctcagaaattttaa

SEQ ID NO: 212 - protein, 52 aa, Haemophilus influenzae
  VARIANT 4, 5, 6, 25: Xaa is any amino acid
MNEXXXWSPAKIKGMNVKITVDNLXNRAYNPYLGELASGTGRNIKFSLSQKF

SEQ ID NO: 213 - DNA, 2049 bp, Haemophilus influenzae
gtggttcaaggtggcgttcattatcaagctgatgacgaaactttataccgcactttgctttggtcacgccttgcttcacgcattttatttcctttgattgaaaccaaaatttacagtgatttggatctttatgcggctgtttcaggctttaattggttagcacaatttgatgaacgagtgacattctttgtcgattttaatggaaccaaccaagaaattcgtcatactcaatttggtgcgatgcgcgttaaagatggaattgtcgattactttgaacgtcaaggtaaaactcgtcctgatgtagataaaattcagccagacgtacgtatccatgcttatttgaatcgtgaaaatttagtgatttctttagatttaagtggggaagcattacatttgcgaggctatcgtgaagatgcaggtcaagcgcctttacgtgaaactctcgcggcggcaattgttatgcgttcaggttggcaagtgggttctccattagtagatccaatgtgtggttcaggtacgcttttaattgaagcggcacaaatggaagccaaaattgcgccgcaactttatcgtttacattggggatttgatttttggaaagcgcataatcaatcggcttgggaaaaagtaaaaaatgaagcgattgaattagcagaagaaaaacaacgtgaaattcaaccgcacttttatggatttgacctcgatcaccgcgtattaaaaaaggcgcagaaaaatgcacaaaatgcaggtgtttcacatttaattaaatggcagcaagctgatgtggcagcgttaaaaaatcctcgtttaaatgaagtcggtacggttatctgtaatccaccttatggcgaacgtttaggaacaacaccagctttaatcgcgctctattctgtatttgggcaaagacttaaaaaagaattttgcggttggaatgtttctgtttttagtagcgaatccacattgcttgattgtttgagaatgcgtgccagccgacagtttaaagcaaaaaatggcccactagattgtgtgcaaaagaattatcaagtttcagaacgaaaatctgacgcaattacagatgaaaaggaactagaatttaaccgcacttcggaggtcgcccccgattttgctaatcgattacaaaaaaatattaagaaaattagcaaatgggcaaagcaacaagaattagacgcttatcgtttatatgatgctgatttgccagaatataatttagctgttgatcgttatgcagattacattgttgtgcaagagtatgcagcgccgaaaaatattgatgaaaataaagctcgtcagcgtttgttagatgccgttactgcaactttgcaagtgacaggtgtggaaacgaataagttgatcctcaaagttcgtcagaaacaaaaaggtacaaatcaatatgagaagttagccaataaaggcgaatacttttatgtgaatgaatatggcacgcaactttgggtaaatttgacagattatttagacactggattattcttagatcaccgtttaacaagaaaaatgattggtgagttggcaaagggtaaagatttcttgaacttatttgcttatacaggttctgccactgttcatgcagcacttggtggcgctaaatcgacaactacagttgatatgtcaaatacttatcttaattgggcggagcaaaatcttattttgaatgatattgaaggtaaacaacataaattaattcaagcagattgccttcaatggttagaaaaatgtgatcgtcaatttgatttgatatttgcggatccaccgacgttttcgaattctaaacgtatggaagagagttgggatgtgcaacgagatcatgtgaaattaatgcgcaatttaaaacgagttttgtcgaataatggcacaattgttttttcgaataataaacgtggattcaaaatgaatttagttgcgttggaagaattaggcttaagtgcaatagaaatttcgcataaaacgttaccgctagattttgaacgtaataaacaaattcataattgttggatgattcaacatatataa

SEQ ID NO: 214 - protein, 682 aa, Haemophilus influenzae
MVQGGVHYQADDETLYRTLLWSRLASRILFPLIETKIYSDLDLYAAVSGFNWLAQFDERVTFFVDFNGTNQEIRHTQFGAMRVKDGIVDYFERQGKTRPDVDKIQPDVRIHAYLNRENLVISLDLSGEALHLRGYREDAGQAPLRETLAAAIVMRSGWQVGSPLVDPMCGSGTLLIEAAQMEAKIAPQLYRLHWGFDFWKAHNQSAWEKVKNEAIELAEEKQREIQPHFYGFDLDHRVLKKAQKNAQNAGVSHLIKWQQADVAALKNPRLNEVGTVICNPPYGERLGTTPALIALYSVFGQRLKKEFCGWNVSVFSSESTLLDCLRMRASRQFKAKNGPLDCVQKNYQVSERKSDAITDEKELEFNRTSEVAPDFANRLQKNIKKISKWAKQQELDAYRLYDADLPEYNLAVDRYADYIVVQEYAAPKNIDENKARQRLLDAVTATLQVTGVETNKLILKVRQKQKGTNQYEKLANKGEYFYVNEYGTQLWVNLTDYLDTGLFLDHRLTRKMIGELAKGKDFLNLFAYTGSATVHAALGGAKSTTTVDMSNTYLNWAEQNLILNDIEGKQHKLIQADCLQWLEKCDRQFDLIFADPPTFSNSKRMEESWDVQRDHVKLMRNLKRVLSNNGTIVFSNNKRGFKMNLVALEELGLSAIEISHKTLPLDFERNKQIHNCWMIQHI

SEQ ID NO: 215 - DNA, 1110 bp, Haemophilus influenzae
atgtcgatgcttaaacctttctggttcaaaactttttctatctcaattattaccgcacttttggtagcttgtacctctaacacaaaaaacactcagattccaaccacctcaaatgggagtgatcctcaacaattcggtgcaaaatataccaatcgaacttatcagcaaaccgctcttgtgcctgtttcctatatagaaaaccaaagtgcggtaataaatcaaggcgattttttaacacagctttccaatataaaaaattattcaagtaaactttccacaaatttttacgataattatgaaaagattacaaattgggttctttctggagcaaatattaatgaactcactcaatttaatatccaaccgcaaattatgcgtggctttgatggatttcaaaatgtgctgatgacaggctattattcgcctatactttatgctcgtcattccccacaaggtcaatttaaaaatccaatttatcgtatgcctgtaaaaaaacgtctaagtcgagcacaaatttatgcgggagcattaacgggaaaaggattagagttagcatatagcgattcaatgttagaaaactttttacttggtgtacaaggcagtggctatgtagattttggcgatggtaatcttaactattttgcttacgcaggacaaaatggttacccttacacggctatcgggcgtttattagtagaagatggcgaaattccaaaagaaaaaatgtctattcaagcaattcgagaatggagtaatcgtaatccctctcgtgtacaaagcttgttagaacgcaatgaagcttatgtattctttaaaaatgatccaagtggcaaagtgaaaggctcttcgggcgttcctcttgtagcaatggcttcagtggcatcagatcacaatattatcccatctggttctgtgcttttagtcgaagtacccgacattgataataacggaaactggattggcacacacaaattacacttaatggttgcacttgatgtaggcggcgcagtgaaaggtcatcacttcgacttatatcgtggtatcggtgctagagcgggacatattgcagggctttcaaaacactacggtagagtatgggtattacggtaa

SEQ ID NO: 216 - protein, 369 aa, Haemophilus influenzae
MSMLKPFWFKTFSISIITALLVACTSNTKNTQIPTTSNGSDPQQFGAKYTNRTYQQTALVPVSYIENQSAVINQGDFLTQLSNIKNYSSKLSTNFYDNYEKITNWVLSGANINELTQFNIQPQIMRGFDGFQNVLMTGYYSPILYARHSPQGQFKNPIYRMPVKKRLSRAQIYAGALTGKGLELAYSDSMLENFLLGVQGSGYVDFGDGNLNYFAYAGQNGYPYTAIGRLLVEDGEIPKEKMSIQAIREWSNRNPSRVQSLLERNEAYVFFKNDPSGKVKGSSGVPLVAMASVASDHNIIPSGSVLLVEVPDIDNNGNWIGTHKLHLMVALDVGGAVKGHHFDLYRGIGARAGHIAGLSKHYGRVWVLR

SEQ ID NO: 217 - DNA, 771 bp, Haemophilus influenzae
atggctagaatagataattacgaacaacgctttggtggcattgggcgactttatacgcctgatggcttagcacgcttacgccaagcgcatatttgcgtgattggcattggcggtgtcggttcttgggtcgtggaggccttagcacgatctggcattggcgaactcacattaattgatatggatgatatttgtgtcacaaatatcaatcgccaacttcctgcgatgagcggcacaatcggcaaattaaaaactgaagtcatgtcagagcgagtaaaattaattaacccagaatgtaccgtcaatattattgatgattttatctcgccagagaatcaatcggattatctcaatcgaggctacgactacgtcattgatgccattgacaatgtgaaaactaaagcgtcgctgattgcttattgtaaacgtaacaaaattaatgtgattactattggcggtgctggcggtcaaactgatccaacccaaattcaaattgccgatctcagtaaaactattcaagatccgctgctcgccaaagtgcggtcagttttacgcaaggattacaattttagccaaaatccaaaacgcaaatttagtatcgatgcgatattttcaacacaacctttaatattcccacaaatgacagaagactgttctatttcagccacaatgaattgcgcaaatgggtttggtgcagccacgatgattacggcaacctttggtttttttgccgtttctcgtgtaatagataaattactaaagaaaaaatcttaa

SEQ ID NO: 218 - protein, 256 aa, Haemophilus influenzae
MARIDNYEQRFGGIGRLYTPDGLARLRQAHICVIGIGGVGSWVVEALARSGIGELTLIDMDDICVTNINRQLPAMSGTIGKLKTEVMSERVKLINPECTVNIIDDFISPENQSDYLNRGYDYVIDAIDNVKTKASLIAYCKRNKINVITIGGAGGQTDPTQIQIADLSKTIQDPLLAKVRSVLRKDYNFSQNPKRKFSIDAIFSTQPLIFPQMTEDCSISATMNCANGFGAATMITATFGFFAVSRVIDKLLKKKS

SEQ ID NO: 219 - DNA, 1044 bp, Haemophilus influenzae
atgaaaaaacttttaaaaattagtgccgtttctgccgcacttttaagtgcaccaatgatggcgaatgccgatgtattagcatcagtaaaacctttaggctttattgtttcatctattgcagatggcgtaactggtacacaagtccttgttcctgcaggcgcctctccgcatgattacaatttgaaattatctgatattcaaaaagtaaaatctgcagatttagttgtatggattggtgaagacattgattcattcttagacaaaccaattagccaaattgaacgtaaaaaagtgattaccattgccgatcttgcggatgtaaaacctttattaagtaaagctcaccacgagcatttccatgaagatggcgatcatgatcatgaccataagcacgaacacaaacatgatcataaacacgaccatgaccatgatcataaacacgagcataaacacgaccacgaccatgatcataaacacgagcataaacacgatcacgaacatcatgatcacgatcatcatgagggtttaacaacaaactggcacgtttggtattctccagctatcagcaaaattgttgcacaaaaagtagcggataaattaactgcacaattcccagataaaaaagcgttaattgcacaaaatctttcagattttaaccgcactttggcagaacaaagtgaaaaaattacggcacaacttgcaaatgttaaagacaaaggtttctacgttttccacgatgcttatggttatttcaacgatgcttatgggttaaaacaaacgggttacttcaccatcaatccattagtagcaccgggtgcaaaaactttagcgcacattaaagaagaaattgatgaacataaagtaaattgcttattcgcagagcctcaatttacgccaaaagtgattgagtctttagcgaaaaatactaaagtcaatgtaggacaactcgacccaattggcgataaagttactttaggtaaaaattcttatgcaacattcttgcaatctactgcagatagctatatggaatgtttagctaaataa

SEQ ID NO: 220 - protein, 347 aa, Haemophilus influenzae
MKKLLKISAVSAALLSAPMMANADVLASVKPLGFIVSSIADGVTGTQVLVPAGASPHDYNLKLSDIQKVKSADLVVWIGEDIDSFLDKPISQIERKKVITIADLADVKPLLSKAHHEHFHEDGDHDHDHKHEHKHDHKHDHDHDHKHEHKHDHDHDHKHEHKHDHEHHDHDHHEGLTTNWHVWYSPAISKIVAQKVADKLTAQFPDKKALIAQNLSDFNRTLAEQSEKITAQLANVKDKGFYVFHDAYGYFNDAYGLKQTGYFTINPLVAPGAKTLAHIKEEIDEHKVNCLFAEPQFTPKVIESLAKNTKVNVGQLDPIGDKVTLGKNSYATFLQSTADSYMECLAK

SEQ ID NO: 221 - DNA, 507 bp, Haemophilus influenzae
atggctgatccacatattaaatcaccgatggattttttagattatctgactgttattatttaccgcactggttttgtgatagcggcgttggctgttcttacagtgagttggtatccagatttatcgctcacatttatattaattgcggcaacctgttgtgcctcttcgttacacatttacttaaaatcttttcgattgctttttcaatttgctacttggataggattacttttttatattaatcattatcctgcgttggctcttggcggtgcgttacttactttaggtggtttgtgttttaaagaatatttttgtttccgcgtgcctttgctaaatttacagccgatatttgtggcttgcttgtggttttcgtgggtgttaaataatcttattgcactacgcattttttctattatttctggcgtattacttttagttttagcgatacaaaaatggcgaatgcctttgcattttgatattggagataaaactaaatatcaaatttag

SEQ ID NO: 222 - protein, 168 aa, Haemophilus influenzae
MADPHIKSPMDFLDYLTVIIYRTGFVIAALAVLTVSWYPDLSLTFILIAATCCASSLHIYLKSFRLLFQFATWIGLLFYINHYPALALGGALLTLGGLCFKEYFCFRVPLLNLQPIFVACLWFSWVLNNLIALRIFSIISGVLLLVLAIQKWRMPLHFDIGDKTKYQI

SEQ ID NO: 223 - DNA, 1362 bp, Haemophilus influenzae
atgaaacatattcatatcttaggtatttgtggcacatttatgggcggtgtggcgatgattgctaaacaaatgggctatcacgtaacgggttccgatactaatgtttaccctccaatgagcacttttttagaagagcaaggtatcgagattattccaaattatgatgttgcacaattacaacctgcgcctgatatggtaattgttggtaatgcgatgaaacgtggtaatccttgcgtagaatatgtgttggaaaataatttgaaatatacatctggtcctcaatggttacatgatcatttattgcgagatcgttgggtattggcggtttcaggtacgcatggaaaaacaacgacaacaggtatgctaacgtggatcttagaacaaaatggcttaaaaccaggttttttaatcggcggaatagccggtaattttggcatttcagctcgtttaggagatagcccttattttgttattgaagctgatgaatatgatacagctttctttgataaacgttcgaaatttgtccattacaatccacgtacacttatcgtaaacaatattagttttgatcacgctgatatttttgatgatctcaaagcgatccaacgccaatttcatcatatgattcgaactatcccagccagtggcttggtattaagttcggcgagtgaacaaagtgcaaaagaaactttggcattgggatgttggtctcaacagcaatttttaggcaaagataacgagtggtttgctgaacgtattacaaatgatgcttcacattttgctgtcttctatcatggagaaaaagtggcagaagtaaaatggaatgtagtgggacaacataatatgcataatgcgttaatggcgatcgctgcggctcatcatactggcgttgctattgaagatgcgtgcaaagcgttgggatcttttgtgaatgctaaacgtcgtttagaagtgaaaggcgaagttaatagcattacggtttatgatgattttgcccatcatccagaagctattcttgctacgctaaccgctttacgagataaagtgggtggtggtgttcgtattcttgcagtgcttgaacctcgttctaacacaatgaaaatgggggttcataaagatgaaattgcgcctgcacttggccgagctgatgaagtgtttatgcttcaaccagaacaactttcttgggaagtggcagatattgcaaaccaatgtgtacaacctgcttattggaatgcaaatttagatcgattagtggatatgattgttgcagaggctcaacctacggatcatattttagtgatgtctaacggcagttttggtggcattcatcaaaaaattcttgataagctaaaactgaaataa

SEQ ID NO: 224 - protein, 453 aa, Haemophilus influenzae
MKHIHILGICGTFMGGVAMIAKQMGYHVTGSDTNVYPPMSTFLEEQGIEIIPNYDVAQLQPAPDMVIVGNAMKRGNPCVEYVLENNLKYTSGPQWLHDHLLRDRWVLAVSGTHGKTTTTGMLTWILEQNGLKPGFLIGGIAGNFGISARLGDSPYFVIEADEYDTAFFDKRSKFVHYNPRTLIVNNISFDHADIFDDLKAIQRQFHHMIRTIPASGLVLSSASEQSAKETLALGCWSQQQFLGKDNEWFAERITNDASHFAVFYHGEKVAEVKWNVVGQHNMHNALMAIAAAHHTGVAIEDACKALGSFVNAKRRLEVKGEVNSITVYDDFAHHPEAILATLTALRDKVGGGVRILAVLEPRSNTMKMGVHKDEIAPALGRADEVFMLQPEQLSWEVADIANQCVQPAYWNANLDRLVDMIVAEAQPTDHILVMSNGSFGGIHQKILDKLKLK

SEQ ID NO: 225 - DNA, 1188 bp, Haemophilus influenzae
atgcaacaacacaatctctcaacaacatttgtccatgcagggcgtaaaaaacgtttttcacaaggatcggtaaaccctgttttacagcgagcttcttcattactatttgacagtattgaagataaaaaatacgctactcaacgtagagcaaaaggcgaattattttatggcagaagagggacgctaacacattttgctttacaagatttaatgtgcgaaatggaggggggggcaggttgttatctttatccttgtggtacagcagcagtaactaattcgattctttcttttgttaaaactggcgaccatgtgttaatgagtggtgcagcttacgagccaacccaatatttctgtaatattgtgctgaaaaaaatgcagatcgatataacttattacgatcctcttattggtgaagatattgcaacgcttattcaaccgaatacaaaagtacttttcttggaagcaccgagttctattacaatggaaattcccgatattccgactattgtgaaagctgcaagaaaggtgaaccctaatattgtgattatgattgataatacttggtcggctggtgttctatttaaagcgttagagcatgatattgatatttctattcaggcgggtacgaaatatttagtgggtcattcagatattatgattggtactgccgttgcgaatgcgcgaacttgggatcaacttagagaacattcctatttaatggggcaaatggttgatgcagattctgcttatacgactgctcgtggtatccgtacattgggggtacgattaaaacaacatcaggaaagcagtattaaagtggcaaaatggttgagtgagcaaccagaagtaaaaactgtgtaccatccagctttaccaagttgccctggacatgaattctttttacgtgattttagtggaagcagtggtttattttcttttgaattaacccagcgattaacttcagagcaagtatcaaaatttatggatcattttcaactgttcgctatggcttattcatggggaggatttgagtcgctaattctttgtaatcaaccagaagaaattgcacatattcgtccaaatattaaacgtaatcttacaggttcattaattcgtgtgcatattggttttgaaaatgtggatgaactaattgcagatttgaaagctggttttgagcgaattgcttaa

SEQ ID NO: 226 - protein, 395 aa, Haemophilus influenzae
MQQHNLSTTFVHAGRKKRFSQGSVNPVLQRASSLLFDSIEDKKYATQRRAKGELFYGRRGTLTHFALQDLMCEMEGGAGCYLYPCGTAAVTNSILSFVKTGDHVLMSGAAYEPTQYFCNIVLKKMQIDITYYDPLIGEDIATLIQPNTKVLFLEAPSSITMEIPDIPTIVKAARKVNPNIVIMIDNTWSAGVLFKALEHDIDISIQAGTKYLVGHSDIMIGTAVANARTWDQLREHSYLMGQMVDADSAYTTARGIRTLGVRLKQHQESSIKVAKWLSEQPEVKTVYHPALPSCPGHEFFLRDFSGSSGLFSFELTQRLTSEQVSKFMDHFQLFAMAYSWGGFESLILCNQPEEIAHIRPNIKRNLTGSLIRVHIGFENVDELIADLKAGFERIA

SEQ ID NO: 227 - DNA, 603 bp, Haemophilus influenzae
atggtattagtaacccgtcaagcaccagattttacttcatctgctgtattaagcaatggcgaaatcgttgataacttcaactttaaaaaacacattgctggaaaagctgcagtaatctttttctacccattagactttacctttgtttgcccttctgagttaatcgcatttgaccaccgttatgaagaattcaaaaaacgtggcgtagaagtagttggtgtttctatcgactctcaattcactcacaatgcatggcgtaacaccccaactgaaaatggtggtatcggtcaagttaaatatgcattagcggcagacgtaaaacacgaaattgctcaagcatacggtattgaacatccagaagcaggcgttgcattacgcgcttcattcttaatcgacaaaaatggcgttgttcgtcaccaagtagtaaacgatcttccattaggtcgtaatatcgatgaaatgttacgtatggttgatgcattacaattccatgaagatcacggtgaagtttgccctgctcaatgggaaaaaggtaaagaagggatgaaagataaccctgaaggtgttgcaaaatacttaaaacaaaacgctgataaactttaa

SEQ ID NO: 228 - protein, 200 aa, Haemophilus influenzae
MVLVTRQAPDFTSSAVLSNGEIVDNFNFKKHIAGKAAVIFFYPLDFTFVCPSELIAFDHRYEEFKKRGVEVVGVSIDSQFTHNAWRNTPTENGGIGQVKYALAADVKHEIAQAYGIEHPEAGVALRASFLIDKNGVVRHQVVNDLPLGRNIDEMLRMVDALQFHEDHGEVCPAQWEKGKEGMKDNPEGVAKYLKQNADKL

SEQ ID NO: 229 - DNA, 558 bp, Haemophilus influenzae
atgaaatttaatattcctattttcctaacgatctttcgagtcattttgattccttttttcgtgattgcattttatttacccattgaatcatctcctttcatcacaacgctcattttttttattgcaggtgtcactgactggctagatggctatctagctcgtaaatggaaacagaccacgcgctttggtgcatttcttgatcctgttgctgataaagtaatggtagtggttgcactagttttaattgtcgaacatcaacatacattttggataaccattcctgccattattatgatttctcgtgaaattatcatctccgcattacgtgaatggatggcagagcttggggaacgtagcaaagtcgcagtctcttggtggggaaaatggaaaaccacagcgcaaatgttagcactaggcggattattatggcgttataacaactatatggaaatagcagcaattatcttactttatatcgccgctattttaactatatggtcaatgatccaatatttacaagtagcaaaaggaagcttgctagataatattcaattataa

SEQ ID NO: 230 - protein, 185 aa, Haemophilus influenzae
MKFNIPIFLTIFRVILIPFFVIAFYLPIESSPFITTLIFFIAGVTDWLDGYLARKWKQTTRFGAFLDPVADKVMVVVALVLIVEHQHTFWITIPAIIMISREIIISALREWMAELGERSKVAVSWWGKWKTTAQMLALGGLLWRYNNYMEIAAIILLYIAAILTIWSMIQYLQVAKGSLLDNIQL

SEQ ID NO: 231 - DNA, 531 bp, Haemophilus influenzae
atggctgattttaatcaaattttaacgccaggcgatgtagatgctggcattatcaatgtagtaaatgaaattccagaaggtagctgccataaaatcgaatggaaccgtaaagttgcggcattccagttagatcgtgttgagccagcaatttttgcaaaaccaactaactatggcttcattccacaaactttagatgaagatggcgatgagttagatgtgttattaatcactcgccaaccattagcaacaggtgtattccttgaggctaaagtaattggtgtcatgaaatttgttgatgatggtgaagtggatgataaaatcgtttgtgttcctgcagatgatcgtgatacaggaaatgcttacaattcattagcagatttaccggcaaacttaattaaacaaattgagttccatttcaataactataaagcacttaagaaacctggctcaacgaaagtgacccattggggcgatgtagaagaagcgaaagaagtgattcgtgagtctattaaacgttggaatgagcgttaa

SEQ ID NO: 232 - protein, 176 aa, Haemophilus influenzae
MADFNQILTPGDVDAGIINVVNEIPEGSCHKIEWNRKVAAFQLDRVEPAIFAKPTNYGFIPQTLDEDGDELDVLLITRQPLATGVFLEAKVIGVMKFVDDGEVDDKIVCVPADDRDTGNAYNSLADLPANLIKQIEFHFNNYKALKKPGSTKVTHWGDVEEAKEVIRESIKRWNER

SEQ ID NO: 233 - DNA, 1317 bp, Haemophilus influenzae
atgccaactttagaaaaaacatttgagctcaaacaacgtggttcaactgttcgtcaagaaattatcgcgggtttaaccacgttcttagcaatggtttattctgtcatcgtggtacccaatatgctgggtgctgcaggttttcctgcggaatctgtctttattgccacctgtttagttgcaggattaggctctatcttaatcggcttatgggcaaatgcaccaatggcaattggttgtgcaatttctcttactgcttttacagcatttagcttagtgattggtcaaaaagtcgccattcccgttgcgctaggcgcagtattcttaatgggggttgtgtttaccttaatttctaccacaggtatccgtgcatggatcttgcgtaatttaccatccaatatcgctcatggagcaggcattggtatcgggctctttttacttttaattgccgcaaacggtgttggtttagtcgtcagcaaccaagctggcttaccagtaaaattaggcgatttcacctcattcccagtcataatgtccttaattggtttagcactcattatcggccttgaaaaaatgaaaattaaaggcggtattttatgggtaattattgctattactattgtcggtttaatttttgatccaaatgtaaaatttggcggagagattttcaaaatgccaacctttggtgaaaattctctcttcttacaattagactttatgggcgcactacaaccagcaatcttgcctgtggtatttgctttggtgatgactgccgtatttgatgcaacgggcactattcgcgcagttgcaggtcaagcagacttgcttgataaggatggtcaaattatcaatggcggtaaagccttaacttcagactcaatcagtagcttattctcaggcttattcggtacagcaccagctgccgtttatattgagtcagcagcagggacagcagcaggcggtaaaacaggtattactgctatcgttgttggtgtgttattcctattaatgcttttcttccaaccattagctttcttagtgccaggctacgcaactgcccctgcattaatgtacgttggtctattaatgttgagtaacgtaagcaaattagatttcgatgatttcgttggagcgatgagcggattaatctgcgcagtgtttatcgtacttaccgctaacatcgtaacaggcattatgttaggttttgcggcattagtaattggaagaatagtgagtggcgatattaaacgcttaaatgtaggtactgtgattattgcaatcgtacttgttgcattctatgcaggcggttgggcgatttag

SEQ ID NO: 234 - protein, 438 aa, Haemophilus influenzae
MPTLEKTFELKQRGSTVRQEIIAGLTTFLAMVYSVIVVPNMLGAAGFPAESVFIATCLVAGLGSILIGLWANAPMAIGCAISLTAFTAFSLVIGQKVAIPVALGAVFLMGVVFTLISTTGIRAWILRNLPSNIAHGAGIGIGLFLLLIAANGVGLVVSNQAGLPVKLGDFTSFPVIMSLIGLALIIGLEKMKIKGGILWVIIAITIVGLIFDPNVKFGGEIFKMPTFGENSLFLQLDFMGALQPAILPVVFALVMTAVFDATGTIRAVAGQADLLDKDGQIINGGKALTSDSISSLFSGLFGTAPAAVYIESAAGTAAGGKTGITAIVVGVLFLLMLFFQPLAFLVPGYATAPALMYVGLLMLSNVSKLDFDDFVGAMSGLICAVFIVLTANIVTGIMLGFAALVIGRIVSGDIKRLNVGTVIIAIVLVAFYAGGWAI

SEQ ID NO: 235 - DNA, 132 bp, Haemophilus influenzae
ttgggcgatttagtaacagaaataagaaaagggaaaagccttccccttaattttaatcacaaaagtgcggtgaaattttaccgcacttttttatacttggattactctttcttcaataagaaaataccgtga

SEQ ID NO: 236 - protein, 43 aa, Haemophilus influenzae
MGDLVTEIRKGKSLPLNFNHKSAVKFYRTFLYLDYSFFNKKIP

SEQ ID NO: 237 - DNA, 675 bp, Haemophilus influenzae
ttgcaagaattttccttacatcgaaacacgattatgtcaaatccctcttgtatcatcatcgccatcacaggtgcatctgcatcaggcaaaagttctatcgcttccactgttcacaaagagctctgtaatgaactaggctgccaagaaattggtatcattactgaagacagttactataaagatcaaagtcatttagaaatgactgagcgggtaaaaacgaattacgatcatccaaactctatggatcgcgatttacttatccaacatttaaaaaatctaaaaaatggcagtgcagtagatgtgcctgtttatagctatgtagaacatactcgcaccaacgaaacaacgcatttcacaccaaaacgaatcgtaattttagaagggattttattacttaccgatgaacgagtacgccaattagccgatatttctgtattcgtagacacaccacttgatatttgtttcatccgccgtttacaacgtgatatggaagaacgtggtcgctctctacaatcagtgattgatcaatatcgtgcaaccgtgcgtccaatgttcttacaatttattgagccgtctaaacaatatgcggatattgtcattcctcgtggtggtaaaaatcgcattgcgatcaatatgttaaaagctcaaatccttcatttattgaatcaaaaatag

SEQ ID NO: 238 - protein, 224 aa, Haemophilus influenzae
MQEFSLHRNTIMSNPSCIIIAITGASASGKSSIASTVHKELCNELGCQEIGIITEDSYYKDQSHLEMTERVKTNYDHPNSMDRDLLIQHLKNLKNGSAVDVPVYSYVEHTRTNETTHFTPKRIVILEGILLLTDERVRQLADISVFVDTPLDICFIRRLQRDMEERGRSLQSVIDQYRATVRPMFLQFIEPSKQYADIVIPRGGKNRIAINMLKAQILHLLNQK

SEQ ID NO: 239 - DNA, 588 bp, Haemophilus influenzae
atgcgtctttgcgatactgatattgaacgctatctcgatgatggcattatttctttaacaccacgtccaaataatgacaaaatcaatggtgcgacaattgatgttcgcttgggtaattctttccgtgtatttcgtgaacactctgcacctttcattgatttaagtggcccgaaagaagaagtctccgcccagcttgaatcagtaatgagcgatgaaattattattccagagggggaagcatttttcttacatcctggtactttagccttagcaaccacgcttgaatccgtgaaattgccagccaatattatcggttggttagatggccgttcttctttagcccgtttaggcttaatggtacacgtcaccgcacaccgtattgatccaggttgggaaggaaaaatcgtgctggaattttataattcagggaaattaccattagcattacgcccaaatatggtaattggtgcgttaagttttgaagtattaagtggcgaagcaaaacgaccatacagcagccgcaaagatgcaaaatataaaaatcaacaaagtgcagtagccagtcgtattgacgaagacaaggaataa

SEQ ID NO: 240 - protein, 195 aa, Haemophilus influenzae
MRLCDTDIERYLDDGIISLTPRPNNDKINGATIDVRLGNSFRVFREHSAPFIDLSGPKEEVSAQLESVMSDEIIIPEGEAFFLHPGTLALATTLESVKLPANIIGWLDGRSSLARLGLMVHVTAHRIDPGWEGKIVLEFYNSGKLPLALRPNMVIGALSFEVLSGEAKRPYSSRKDAKYKNQQSAVASRIDEDKE

SEQ ID NO: 241 - DNA, 1176 bp, Haemophilus influenzae
atgaaaaagttcgcacttatcgtagggatcgtcttcttggcgatcttttcttttttatatattcaactttaccgcgtgcaaagtgctattaatgaacaactggcacaacaaaacattgccgttcagtcaatcaatttatcattattttctcccgcactttcccttgaaaatataaaaactacgcaattttcagctcaaaaaattgaagctaaatttagttttttgcctcttttgtatggaaacgcagcacttcattcactgaatattcaacagctcaaattaactcaaaacacacaaaatcctgccaatgtatcgatagaggtttcgcctttttcattaaaacagcttttatcaaaaaaagtaatattaaatggcgaaaatcatattcgcattgaatttaataaacctatttatggaaaaacaaaaactttccatttttctttccataaagcgaatttagacttctcaacatcagaatcagccccacttcaatttgtagatgcaagcctaaataatcagcctatcggttatattgaaactcacacagcccaccaacaaatagtgacttatataaaaccacaatgcgataacgattgtttagccgtattgaaatatcaacaaatagacaatcaaagtgcggtaaatttttcgggtaaatatttccctgttcaacgcttattcgcactattaaatttgccagaaatgttaagtggacacgctgattttgatcttgatttcagcttttcatcttcctcgcttattcaaggaaaattaaattttttagcgcaaaatggcgaaattcttggtgtgaatctattggatatggtagcgcaatatttcccgattaattacaacaatgatttgttacaaaacaaagaattaaacactcgctttgaacaattttacttacaattatttctccaacaaaatcaactcattgctgaaaaaatcgaattaaaaacgcccgcacttttggggcaaggaaaaggcatcattgatttaaatcgaatggaatgcaatgtggatattaatttaaattctacggatcaacgctatcaaaatttaaccctgccaatcaatttttttggtaactgcaattctccacaatacaaaattaattttacgaagaaattccgccatcaattaattgatgcgattaaagaaaagttacgttaa

SEQ ID NO: 242 - protein, 391 aa, Haemophilus influenzae
MKKFALIVGIVFLAIFSFLYIQLYRVQSAINEQLAQQNIAVQSINLSLFSPALSLENIKTTQFSAQKIEAKFSFLPLLYGNAALHSLNIQQLKLTQNTQNPANVSIEVSPFSLKQLLSKKVILNGENHIRIEFNKPIYGKTKTFHFSFHKANLDFSTSESAPLQFVDASLNNQPIGYIETHTAHQQIVTYIKPQCDNDCLAVLKYQQIDNQSAVNFSGKYFPVQRLFALLNLPEMLSGHADFDLDFSFSSSSLIQGKLNFLAQNGEILGVNLLDMVAQYFPINYNNDLLQNKELNTRFEQFYLQLFLQQNQLIAEKIELKTPALLGQGKGIIDLNRMECNVDINLNSTDQRYQNLTLPINFFGNCNSPQYKINFTKKFRHQLIDAIKEKLR

SEQ ID NO: 243 - DNA, 1209 bp, Haemophilus influenzae
atgtcgttatatttaaaagctgaaaaaatccaatcatggcgcgtgcttattatggcttgcgcaggatttatttttaatactacagaatttgtacccgttgcaatgttaagcgatattgcacaaagttttgatatgcaaactgctgatactggtttaatgatgaccgtttatgcttggacggtgctaattatgtctttacctgcgatgcttgccacgggcaatatggaacgtaaaagtctgcttattaagcttttcattatatttattgttgggcatattttatcggtcattgcatggaatttctggatactacttctcgctcgaatgtgtattgcattagcacattcggtgttttggtcaattactgcctcacttgtgatgcgcatctcacctaaacacaagaaaactcaagcattaggaatgctcgctattggcaccgcacttgccaccatcttaggcttaccaattgggagaattgtcggacagcttgtcggttggcgagtcacttttggcattattgcggtactggcattatccatcatgtttttaattattcgattattaccaaatttacccagtaaaaatgctggctctattgcaagtttacccttgcttgctaaacgtccattattactttggctttatgtaacaacggcaatcgtcatttcagcacattttactgcttatacttatatcgaaccatttatgattgatgtcgggcatttagatccaaattttgccacggctgtattattagtttttggtttctcaggtattgccgcaagcctattatttaacagattataccgatttgctcccacaaaatttattgttgtttcgatgagtttattgatgttctccctcttactactcctcttttcgaccaaaacaataatagcaatgttcagccttgtgtttatttgggggattggcatttcttgtatcggactatctctacaaatgcgcgtactaaaacttgcgccagatgcaaccgatgttgccacagctatttactcgggcattttcaatgcaggaattggcgcaggcgcattatttggaaaccttgcgacaacctatttaggattaaatgaaattggttatacaggcgcaacattaggtttaatcggtctcattatttttattacaacgcacttaaaatatcgccatacctttcttctacaaaacaataaaaaaataaccgcactttag

SEQ ID NO: 244 - protein, 402 aa, Haemophilus influenzae
MSLYLKAEKIQSWRVLIMACAGFIFNTTEFVPVAMLSDIAQSFDMQTADTGLMMTVYAWTVLIMSLPAMLATGNMERKSLLIKLFIIFIVGHILSVIAWNFWILLLARMCIALAHSVFWSITASLVMRISPKHKKTQALGMLAIGTALATILGLPIGRIVGQLVGWRVTFGIIAVLALSIMFLIIRLLPNLPSKNAGSIASLPLLAKRPLLLWLYVTTAIVISAHFTAYTYIEPFMIDVGHLDPNFATAVLLVFGFSGIAASLLFNRLYRFAPTKFIVVSMSLLMFSLLLLLFSTKTIIAMFSLVFIWGIGISCIGLSLQMRVLKLAPDATDVATAIYSGIFNAGIGAGALFGNLATTYLGLNEIGYTGATLGLIGLIIFITTHLKYRHTFLLQNNKKITAL

SEQ ID NO: 245 - DNA, 858 bp, Haemophilus influenzae
  misc_feature 9, 10, 11, 12, 13: n is any nucleotide
atggaatgnnnnnccaatgtgggtaaatctactttaaccaatcgtattttaggcgaagatcgtgtggtggtttttgatatgccaggtacgacacgtgacagtatttatattccaatggagcgtgatggacagcaatataccttgattgataccgctggtgtgcgtaagcgtggtaaagtgcatttggcagtggaaaaattctctgtgattaaaaccttacaagcgattcaagatgctaatgttgtattgctgactattgatgcgagagagaacatttctgatcaggatttatctttgctcggctttattttaaatgcagggcgttctctagtgatcgtcgtgaataaatgggatggtttagatcaagatgtgaaagatcgtgtgaaatctgagcttgatcgtcgtttagattttattgattttgctcgggtgcattttatttcagccttgcacggaagtggtgtgggtaatctttttgattcgattaaagaagcctatgcttgtgccactcaaaaaatgacgacttcgcttttaactcgtattttgcaaatggcaacggatgagcaccaaccgccgatgattggcggtcgtcgcattaaattaaaatatgctcacccaggtggttacaatccgccgattatagtggttcacggtaaccaaatggataaattaccagattcttataaacgttatttatctaattattatcgtaagagcttaaaaattattggttcaccgattcgtctgcttttccaagaaggctcaaacccatttgcaggacgcaaaaataaactcactccgaaccaattgcgtaaacgtaaacgtttgatgaagtttattaagaaagcgaaacgttaa

SEQ ID NO: 246 - protein, 285 aa, Haemophilus influenzae
  VARIANT 3, 4, 5: Xaa is any amino acid
MEXXXNVGKSTLTNRILGEDRVVVFDMPGTTRDSIYIPMERDGQQYTLIDTAGVRKRGKVHLAVEKFSVIKTLQAIQDANVVLLTIDARENISDQDLSLLGFILNAGRSLVIVVNKWDGLDQDVKDRVKSELDRRLDFIDFARVHFISALHGSGVGNLFDSIKEAYACATQKMTTSLLTRILQMATDEHQPPMIGGRRIKLKYAHPGGYNPPIIVVHGNQMDKLPDSYKRYLSNYYRKSLKIIGSPIRLLFQEGSNPFAGRKNKLTPNQLRKRKRLMKFIKKAKR

SEQ ID NO: 247 - DNA, 1005 bp, Haemophilus influenzae
  misc_feature 4, 5, 6, 7, 8: n is any nucleotide
atgnnnnncgtagaattaggtggtcgtttaagcattatcgcagaacaaagtaatagcactgtagataatcaaaaacagcaacacggtgcattacgcaatcaaggttcacgtttccacattaaagcaactcataacttcggtgatggtttctatgcacaaggttatttagaaactcgttttgttacaaaagcctctgaaaacggttcagataacttcggtgatattacaagcaaatatgcttatgttactttaggaaataaagcattcggtgaagtaaaacttggtcgtgcgaaaactattgctgatggcataacaagtgcagaagataaagaatatggcgttctcaacaatagtgactatattcctactagtggtaataccgttggctatacttttaaaggtattgatggtttagtattaggcgctaattatttattagcacaaaagcgtgagggtgcaaaaggtgaaaataagcagcctaatgataaggctggtgaagtacgtataggtgaaatcaataatggaattcaagttggtgcaaaatatgatgcaaacgacatcgttgcaaaaattgcttatggtagaactaactacaaatataacgaatctgacgagcataaacagcaattaaatggtgtattagcaactttaggctatcgttttagtgatttaggcttattagtgtctctagatagtggctatgcaaaaactaaaaactataaaattaaacacgaaaaacgctatttcgtatctccaggtttccaatatgaattaatggaagatactaatgtctatggcaacttcaaatatgaacgcacttctgtagatcaaggtgaaaaaacacgtgaacaagcagtattattcggtgtagatcataaacttcacaaacaactattaacctatattgaaggtgcttacgctagaactagaacaactgagacaggtaaaggcgtaaaaactgaaaaagaaaaatcagtgggtgtaggtttacgcgtttacttctaa

SEQ ID NO: 248 - protein, 334 aa, Haemophilus influenzae
  VARIANT 2, 3: Xaa is any amino acid
MXXVELGGRLSIIAEQSNSTVDNQKQQHGALRNQGSRFHIKATHNFGDGFYAQGYLETRFVTKASENGSDNFGDITSKYAYVTLGNKAFGEVKLGRAKTIADGITSAEDKEYGVLNNSDYIPTSGNTVGYTFKGIDGLVLGANYLLAQKREGAKGENKQPNDKAGEVRIGEINNGIQVGAKYDANDIVAKIAYGRTNYKYNESDEHKQQLNGVLATLGYRFSDLGLLVSLDSGYAKTKNYKIKHEKRYFVSPGFQYELMEDTNVYGNFKYERTSVDQGEKTREQAVLFGVDHKLHKQLLTYIEGAYARTRTTETGKGVKTEKEKSVGVGLRVYF

SEQ ID NO: 249 - DNA, 1146 bp, Haemophilus influenzae
atgaaatacgcattaattaattgtgtaatttacacaaaatatgatgttttacgtgattttgctgtaattattaacggtgaaattattgaagcggtagttccccaagctgaattagaaacaggtatcaaaaccattgatttacaaggtaataatttaactgctggttttattgatctgcaattaaatggctgtggtggcgtgatgtttaacgaccaaaccagcgttgaaaccttggaaattatgcaggaaactaacttaaaatcaggttgtacaagtttccttcccacttttattaccgcgcctgatgaaaatataaaaagtgcggtaaaaattatgcgtgaatatttaaacaagcataaaaaccaagcacttggtttacatattgaagggccttatctcagcattgagaaaaaaggtgtacaccgtcccgaatatattcgtgaaattacgcctgaaatgaaagattttctctgccaaaatggcgatgtcattacaaaaatgaccattgccgcagaaaacccaaccattaactatacgcctgattttgtgaaagcgggcattattgtctctgtaggccattctaatgccacttatgaagtggctaaagccgcattccataaaggcgcaacttttgcgactcacttgcataatgcaatgtcgccaattagttctggacgtgaaatgggcgtagtgggtgcagtattagattctgatgtttacactggcattatcgtcgatggtgtgcatatcaattacggcaatgttcgcattgataaaaaaatcaaaggcgacaaactttgtattgtgactgactctattgcagctgcaggcgcaccgccagaactagaaagttttacctttgtaggaaaaacaatttatatcaaagaagggcgttgctatgatgcaaatggcacaattgcaggggcatcaatcacaatgatggaatctattaaaaatgcggtagaatatgttgaaattcctcttgcggaagccattagaatgagtaacctttatcctgcacgagcaattggtatagatgatcgtttaggttcggtagaaaaaggtaagatagcaaacttagccgtgtttacgccaaattaccaagtaatcggcacagtagtaaacggaaagtggaaagagaattaa

SEQ ID NO: 250 - protein, 381 aa, Haemophilus influenzae
MKYALINCVIYTKYDVLRDFAVIINGEIIEAVVPQAELETGIKTIDLQGNNLTAGFIDLQLNGCGGVMFNDQTSVETLEIMQETNLKSGCTSFLPTFITAPDENIKSAVKIMREYLNKHKNQALGLHIEGPYLSIEKKGVHRPEYIREITPEMKDFLCQNGDVITKMTIAAENPTINYTPDFVKAGIIVSVGHSNATYEVAKAAFHKGATFATHLHNAMSPISSGREMGVVGAVLDSDVYTGIIVDGVHINYGNVRIDKKIKGDKLCIVTDSIAAAGAPPELESFTFVGKTIYIKEGRCYDANGTIAGASITMMESIKNAVEYVEIPLAEAIRMSNLYPARAIGIDDRLGSVEKGKIANLAVFTPNYQVIGTVVNGKWKEN

SEQ ID NO: 251 - DNA, 813 bp, Haemophilus influenzae
atgcgttttattccattacaaacagaacaacaagtcagttgttgggctgcacaacatatcatcaatcgtatcaacgattttaaacctaccgccgagcgtccttttgtattggggttacctactggtggtacaccactaaaaacttatcaagaactgattcgacttcatcaagcaggcaaagtgagtttcaaacacgtagtgactttcaatatggatgaatatgtggctttaccagaggaacaccctgaaagttaccacagctttatgtataacaattttttcaatcatatcgatattttacctgaaaatatcaatattcttaacggcaataccgatgaccataatgcagaatgccatcgttatgaagaaaaaattaaatcctacggcaaaattcatctgtttatggggggggttggcgtagatggacatatcgcatttaatgaacctgcttcttcattaagttctcgcacccgtattaaaacgctaacgcaagatacattaattgcaaattcacgcttctttaataacgatgttactcaagtgccgaaatatgctttaaccattggtgttggcacattattagatgcagaagaagtgatgattttagcaacaggacatcaaaaagcactggcagtgcaagctgccgttgaaggcagtattaaccacttatggacagtcagtgcattacaaatgcaccgtcatttcttgcttgtttgtgatgaagctgctcaacaagagttaaaagtgaaaaccgtgaaatattttactgaattagaaggcgcggttgctggtacggattatcaggataaatag

SEQ ID NO: 252 - protein, 270 aa, Haemophilus influenzae
MRFIPLQTEQQVSCWAAQHIINRINDFKPTAERPFVLGLPTGGTPLKTYQELIRLHQAGKVSFKHVVTFNMDEYVALPEEHPESYHSFMYNNFFNHIDILPENINILNGNTDDHNAECHRYEEKIKSYGKIHLFMGGVGVDGHIAFNEPASSLSSRTRIKTLTQDTLIANSRFFNNDVTQVPKYALTIGVGTLLDAEEVMILATGHQKALAVQAAVEGSINHLWTVSALQMHRHFLLVCDEAAQQELKVKTVKYFTELEGAVAGTDYQDK

SEQ ID NO: 253 - DNA, 882 bp, Haemophilus influenzae
atgcgtgatttaaaaggtattttcagtgcattattagtgtcatttaatgaagatggcacaattaatgaaaaaggtttacgccaaattatccgccataatatcgacaaaatgaaagttgatggcttatatgtgggcggttcaacaggcgaaaactttatgctttcaattgaagagaaaaaagaaatcttccgcattgcaaaagatgaagcaaaagatcaaatcgcactaattgctcaagtgggcagcgtaaacttaaaagaagcagtggaattaggtaaatatgcaacagaattaggctacgactgcttatctgcagtgacgccattctattacaaatttagcttccctgaaattaaacattattacgacaccatcatcgctgaaacgggcaacaatatgatcgtgtactcaatcccgttcttaactggcgtgaatatgggtattgaacaattcggtgaactttacaaaaacccgaaagtattaggggtaaaattcacagcaggtgatttctacttattagaacgtttgaaaaaagcttatccaaaccacttaatttgggcaggtttcgatgaaatgatgttaccggcagcctcacttggtgtggatggtgcaattggttcaactttcaacgtaaacggcgttcgtgctcgtcaaatttttgaattaaccaaagcgggtaaattagccgaagcgttagaaatccaacacgtaaccaacgatttaatcgaaggcattttagcgaacggtttatatttaaccatcaaagaattgcttaaattagaaggggtggatgcaggttattgccgtgaaccaatgacatcaaaagcaacagcagaacaggttgcaaaagcaaaagacttgaaagcgaaatttttgtcataa

SEQ ID NO: 254 - protein, 293 aa, Haemophilus influenzae
MRDLKGIFSALLVSFNEDGTINEKGLRQIIRHNIDKMKVDGLYVGGSTGENFMLSIEEKKEIFRIAKDEAKDQIALIAQVGSVNLKEAVELGKYATELGYDCLSAVTPFYYKFSFPEIKHYYDTIIAETGNNMIVYSIPFLTGVNMGIEQFGELYKNPKVLGVKFTAGDFYLLERLKKAYPNHLIWAGFDEMMLPAASLGVDGAIGSTFNVNGVRARQIFELTKAGKLAEALEIQHVTNDLIEGILANGLYLTIKELLKLEGVDAGYCREPMTSKATAEQVAKAKDLKAKFLS

SEQ ID NO: 255 - DNA, 867 bp, Haemophilus influenzae
atggctaaatcgggaaatgtgttaaacaaaattggctcactttaccagagtttaactaaatcagagaaaaaaattgccgatacgattttgcgttcgcctgatttagtctctcaatgctccctttcagaaatcgctaaacatttgcaagttggagaagctacgcttgtccgtttttgtcgaaccattggttttaaaggtttcagtgagttcaaactagagctttctattgaacttgcaacgaaagataatcaagatgaaagcatacttgaaacagaaattatgccaagtgatgattcgctcactattgcacaaaaattgcaaacggcggttgctaatgtaatggaagaaacgattaatttacttgatttaaaacagcttgaagaagtcgttaaagtacttaaaaaagcacgccgtatctttttatttggtgtgggttcatctggcgtaacggctgaagatgctaaaaataagctgatgcgtattggttttcaagtggatgcttcaggtaataatcattttatgtatatgcaggcggcattattgacctcttctgatgtggcaattggtttaagccattctggttattctgctgaaacggcacataccatcaaaatcgcaaaacaaaatggtgcaacaacagtggcattgacgcatagtttgcgttcccccgtgacagaatatgctgattatgttttggtaaatggtaataaacaaggcaagttacaaggcgattctattggcaccaaaattgcacagctttttgtattagatttaatttatgctttgttagtgcagggcgaagaagaaattgccgctcaaactaaacaaaaaactctcaatgtaattcttgaacaacgtataaaatag

SEQ ID NO: 256 - protein, 288 aa, Haemophilus influenzae
MAKSGNVLNKIGSLYQSLTKSEKKIADTILRSPDLVSQCSLSEIAKHLQVGEATLVRFCRTIGFKGFSEFKLELSIELATKDNQDESILETEIMPSDDSLTIAQKLQTAVANVMEETINLLDLKQLEEVVKVLKKARRIFLFGVGSSGVTAEDAKNKLMRIGFQVDASGNNHFMYMQAALLTSSDVAIGLSHSGYSAETAHTIKIAKQNGATTVALTHSLRSPVTEYADYVLVNGNKQGKLQGDSIGTKIAQLFVLDLIYALLVQGEEEIAAQTKQKTLNVILEQRIK

SEQ ID NO: 257 - DNA, 903 bp, Haemophilus influenzae
atgcgttgtttagcactagatattggtgggacaaaaattgctgcggcgattgtaaaaaatggcgaaattgagcaacgtcagcaaattcatacaccacgtgaaaatgtcgtggagggaatgcaccaagcgttaggcaaattgcttgctgattatgaagggcagtttgattatgtagcggtagcatctacggggattatcaataatggcattttaagtgcattaaatccgaaaaacttaggtggcttggcggaatttccacttaaagcgagtattgcaaaacatacggataaaccgattggtttattaaatgatgcacaagctgcgacttatgcggaatatcaattgcaaaattctgaacaggtatcaaattttgtttttattaccgtttcaacaggagttggcggagggattgtgctgaaccaaattttgcagacaggttctcgtggtattgctgggcatattggccatacattagctgatccaaatggtgcgatctgtggttgtgggcgtcgaggttgcgtcgaagcgattgcttcagggcgagcaattgaagcagtttcttcccaatgggaagatccgtgcgatccaaaagaagtgtttgaacgttttagaaaaaatgatgaaaaagcgaccgcacttgtcgagcgttctgcgaaagccattgctaatttaattgctgatttagtgattagtttagatattcaaaaaatcgcaattggtggcagtgtgggattagctgagggctatttatctttggttgaaaaatatttacaagattttccttcgatatattgttgtgaaattgaaaccgctaaatttggacaagatgcaggtttaattggcgcagcttattgggtaaaagatgttttactggataagcctgaaggaacaatttatggctaa

SEQ ID NO: 258 - protein, 300 aa, Haemophilus influenzae
MRCLALDIGGTKIAAAIVKNGEIEQRQQIHTPRENVVEGMHQALGKLLADYEGQFDYVAVASTGIINNGILSALNPKNLGGLAEFPLKASIAKHTDKPIGLLNDAQAATYAEYQLQNSEQVSNFVFITVSTGVGGGIVLNQILQTGSRGIAGHIGHTLADPNGAICGCGRRGCVEAIASGRAIEAVSSQWEDPCDPKEVFERFRKNDEKATALVERSAKAIANLIADLVISLDIQKIAIGGSVGLAEGYLSLVEKYLQDFPSIYCCEIETAKFGQDAGLIGAAYWVKDVLLDKPEGTIYG

SEQ ID NO: 259 - DNA, 603 bp, Haemophilus influenzae
atggataaacctgaaatcgtttctgctatggctcaggcttcggttatgggcggcgcttctggcttacgtattgagggggttgataaccttaaagcaacccgtccttttgtgaatgttccgattatcggaattgtaaaacgtgatttgcctgatagtcccgtgcgtattacgccgtttttacaagatattgaagatctagccaatgcaggcgcggatattattgcagtagatggcactaaacgcccgcgtcctgtggatattgaaagtgcggtgaaaaaaatccacgaaatgggctgtttggcaatggcagattgttctaatttagaagaaggcttgtattgtaaagcgcttggttttgatattgtcggcagtacgatgtcgggttatacaggtggcgcagtgccaaaagaaccagattatcaattagtgaaagatttaaaatcagcgggttgttttgtgatggctgaggggcgttataacacaccagaattggcaaaagtggcaattgaaattggtgcagattgcgtgactgtaggttcagctttaactcgtcttgaacatattgtgagttggtttgctaattcagtgaaatctgcaagatag

SEQ ID NO: 260 - protein, 200 aa, Haemophilus influenzae
MDKPEIVSAMAQASVMGGASGLRIEGVDNLKATRPFVNVPIIGIVKRDLPDSPVRITPFLQDIEDLANAGADIIAVDGTKRPRPVDIESAVKKIHEMGCLAMADCSNLEEGLYCKALGFDIVGSTMSGYTGGAVPKEPDYQLVKDLKSAGCFVMAEGRYNTPELAKVAIEIGADCVTVGSALTRLEHIVSWFANSVKSAR

SEQ ID NO: 261 - DNA, 975 bp, Haemophilus influenzae
  misc_feature 4, 5, 6, 7, 8: n is any nucleotide
atgnnnnnttcttgccccgccatttctttaggcgtatcttctgctgttcttgccgctgattatgacttgaaattcggtatgaatgctggaacttcatcaaatgaatataaagcggcagaaatgtttgccaaagaagtcaaagaaaaatcacagggtaaaattgaaatttcactttatccaagttcacaattaggtgatgaccgtgcaatgttaaaacaattaaaagacggttctctcgactttacctttgcagaatctgctcgcttccagctgttttaccctgaagcggcagtatttgccttaccttatgttattagcaactacaatgttgcacaaaaagccttattcgatacagaattcggtaaagatttaattaaaaaaatggacaaagatcttggcgtgactttactttcccaagcttataacggaactcgccaaacgacttcaaatcgtgcaatcaacagtattgcagatatgaaaggcttaaaacttcgtgtgccaaatgcagcaacaaacttagcctatgctaaatatgttggcgcatcaccaacaccaatggcattttctgaagtttatcttgcgttacaaaccaacgccgtcgatggtcaagaaaacccgttagcagcggtgcaagcacaaaaattctatgaagtgcaaaagttcttagcaatgactaatcacattttgaatgaccaactttatttagtaagcaacgagacttataaagaactccctgaagatcttcaaaaagtcgtaaaagatgctgccgaaaatgcagcaaaatatcacactaaattattcgtagatggagagaaagatttagtcacattctttgaaaaacaaggcgtgaaaattacacatcctgatcttgttccatttaaagcatcaatgaagccgtattatgctgagtttgtaaaacaaactggtcaaaaaggtgaatcagctttaaaacaaattgaagcaatcaatccataa

SEQ ID NO: 262 - protein, 324 aa, Haemophilus influenzae
  VARIANT 2, 3: Xaa is any amino acid
MXXSCPAISLGVSSAVLAADYDLKFGMNAGTSSNEYKAAEMFAKEVKEKSQGKIEISLYPSSQLGDDRAMLKQLKDGSLDFTFAESARFQLFYPEAAVFALPYVISNYNVAQKALFDTEFGKDLIKKMDKDLGVTLLSQAYNGTRQTTSNRAINSIADMKGLKLRVPNAATNLAYAKYVGASPTPMAFSEVYLALQTNAVDGQENPLAAVQAQKFYEVQKFLAMTNHILNDQLYLVSNETYKELPEDLQKVVKDAAENAAKYHTKLFVDGEKDLVTFFEKQGVKITHPDLVPFKASMKPYYAEFVKQTGQKGESALKQIEAINP

SEQ ID NO: 263 - DNA, 1851 bp, Haemophilus influenzae
atgaaatatattaataagcttgaggaatggctgggtggcgcattatttatcgccattttcggtattcttatcgctcaaattctttcacgccaagtttttcattctccgttaatttggagtgaagaactcgccaagctcttatttgtttacgtgggtatgttgggtatcagcgttgctgtgagaaaacaagaacacgtatttattgattttttaactaatctaatgcccgaaaaaatcagaaaattcacaaatactcttgtacaattattagtctttatatgtattttcttatttattcatttcggtattcgtacttttaacggtgcatcattccctattgatgccttaggaggcatttctgaaaaatggattttcgcagcactgcctgttgtcgcaatcttaatgatgtttcgctttatccaagcgcaaaccgtaaactttaagactgggaaaagctatttacctgcgactttctttatcataagtgcggtcattttatttgcgattttatttttcgcaccagattggttcaaagtattgcgtattagcaattatataaaactcggttcaagttcagtctatgtcgccttactcgtttggctaatcattatgtttatcggtgtccctgtaggttggtccttatttattgctactctactttatttttctatgacacgttggaacgtcgtaaatgccgcaactgaaaaattagtctatagcctagacagcttcccattacttgccgtgccattttatattttaacgggcattctaatgaatacaggtgggattaccgaacgtatttttaattttgctaaagccttactcggtcattacacaggaggaatgggacacgttaatatcggcgcaagtttattgttctctggtatgtcaggttcagcacttgctgatgcggggggcttaggtcaattggaaatcaaagcaatgcgtgatgctggttatgacgatgatatttgcggaggaattactgctgcttcttgtattattgggccattagttccgccaagtattgcaatgattatttacggtgtaattgccaatgaatctatcgcaaaactctttattgcaggttttattccaggtgtattaattactttagctttaatggcaatgaattatcgcattgcaaaaaaacgaggttatccacgtacaccaaaagctacgagagaacaactttgcagcagctttaaacaatctttttgggcaatcttaacgccgttattaattatcggtggtattttttcaggcttattcagtccaacagaatctgccattgttgcggcagcatactctgtaattattggtaaattcgtgtataaagaattaaccttaaaaagcttatttaatagttgcatagaagcaatggcaattacgggcgtagtcgccttaatgattatgactgtgactttctttggcgatatgattgcccgtgaacaagtcgcaatgcgtgttgctgatgtgtttgttgccgttgccgattcgcctttaaccgtattgataatgattaacgcactgctactttttcttggaatgttcattgatgccctagcattacaatttttagtattaccaatgcttattcctatcgcaatgcagttcaatattgacttaatcttctttggtgtaatgaccacattaaatatgatggttggtattcttaccccaccaatgggaatggctctctttgttgttgctcgtgtaggaaatatgtcagtttccacggtaaccaaaggcgtattaccgttcttgattcccgttttcgtcacattagtattaatcacgattttcccacaaatcatcacatttgtgccaaatctattgataccataa

SEQ ID NO: 264 - protein, 616 aa, Haemophilus influenzae
MKYINKLEEWLGGALFIAIFGILIAQILSRQVFHSPLIWSEELAKLLFVYVGMLGISVAVRKQEHVFIDFLTNLMPEKIRKFTNTLVQLLVFICIFLFIHFGIRTFNGASFPIDALGGISEKWIFAALPVVAILMMFRFIQAQTVNFKTGKSYLPATFFIISAVILFAILFFAPDWFKVLRISNYIKLGSSSVYVALLVWLIIMFIGVPVGWSLFIATLLYFSMTRWNVVNAATEKLVYSLDSFPLLAVPFYILTGILMNTGGITERIFNFAKALLGHYTGGMGHVNIGASLLFSGMSGSALADAGGLGQLEIKAMRDAGYDDDICGGITAASCIIGPLVPPSIAMIIYGVIANESIAKLFIAGFIPGVLITLALMAMNYRIAKKRGYPRTPKATREQLCSSFKQSFWAILTPLLIIGGIFSGLFSPTESAIVAAAYSVIIGKFVYKELTLKSLFNSCIEAMAITGVVALMIMTVTFFGDMIAREQVAMRVADVFVAVADSPLTVLIMINALLLFLGMFIDALALQFLVLPMLIPIAMQFNIDLIFFGVMTTLNMMVGILTPPMGMALFVVARVGNMSVSTVTKGVLPFLIPVFVTLVLITIFPQIITFVPNLLIP

SEQ ID NO: 265 - DNA, 1128 bp, Haemophilus influenzae
atgaaactaactaaaacagcattatgcactgcactttttgccacctttactttttcagcgaacgcacaaacttatcctgatttgccagtggggatcaaaggaggaacaggcgcattaattggcgacaccgtttatgtgggattaggttctggtggcgataaattctataccttagacctaaaagatccttcagcacaatggaaagaaattgctacatttccaggtggcgaacgcaatcaacctgttgcagccgcagtggatggaaaactttatgtattcggtggtttacaaaaaaatgaaaaaggcgaacttcaactcgttaatgacgcttatcgctataacccaagcgataatacttggatgaaacttcctactcgttctcctcgcggcttagtaggatcaagtggcgcatctcacggagataaagtttatattttaggcggctctaacctctctatatttaatggtttcttccaagacaacgttgcagcaggagaagataaagggaaaaaagatgaaatcgttgcagcttacttcgatcaacgtccagaagattatttctttacaacagaattattgagctatgaaccctcaactaacaaatggcgcaatgaaggtcgtattccattctctggtcgtgctggtgcagcctttacaattcaaggtaatgatctagtggttgtcaatggcgaaattaaacctggacttcgcaccgctgaaacccatcaaggtaaattcactgataaaggtgtgcaatggaaaaacttacctgacttgcccgcaccaaaaggcaaatcacaagatggtttagctggtgcacttgcaggctatagtaacggtcattatttagtcactggtggcgcaaattttccaggttcaataaaacaattcaaagaaggaaaacttcacgcacataaaggtttaagcaaagcttggcataacgaagtttatactttaaataatggtaaatggagcatcgttggggaattaccaatgaatattggctatggtttttctgtatcttacaataataaagttttactgattggcggcgaaactgatggaggtaaggctttaactagcgtcaaagcaatcagctatgatggtaaaaaattaaccatcgaataa

SEQ ID NO: 266 - protein, 375 aa, Haemophilus influenzae
MKLTKTALCTALFATFTFSANAQTYPDLPVGIKGGTGALIGDTVYVGLGSGGDKFYTLDLKDPSAQWKEIATFPGGERNQPVAAAVDGKLYVFGGLQKNEKGELQLVNDAYRYNPSDNTWMKLPTRSPRGLVGSSGASHGDKVYILGGSNLSIFNGFFQDNVAAGEDKGKKDEIVAAYFDQRPEDYFFTTELLSYEPSTNKWRNEGRIPFSGRAGAAFTIQGNDLVVVNGEIKPGLRTAETHQGKFTDKGVQWKNLPDLPAPKGKSQDGLAGALAGYSNGHYLVTGGANFPGSIKQFKEGKLHAHKGLSKAWHNEVYTLNNGKWSIVGELPMNIGYGFSVSYNNKVLLIGGETDGGKALTSVKAISYDGKKLTIE

SEQ ID NO: 267 - DNA, 435 bp, Haemophilus influenzae
atgttatttattccaccaccactactctgtttattcattgccatagcaatgtattttttgccaaagattgctagttattctgtccatttttcagtgattgtttttgttatttccctttcatttttgattgctttaagcagcgttatgcaattctttatatgtaaaacctccattaatcctcgtgactttaaaggcacaacaaaattagtttccacaggcatatttcgatttagccgtaacccaatgtatttaagtttgctgttaatgttaattgcgtgggctctttggttaggtaatagtttggcttggttaggcgtgattgtctttatactagttatgaaccactgtcaaatagcccgagaagaaacctatttggaaagtaaatttggcgatgaatatcgtcgttacaaacaaaaagtaagacgttggctataa

SEQ ID NO: 268 - protein, 144 aa, Haemophilus influenzae
MLFIPPPLLCLFIAIAMYFLPKIASYSVHFSVIVFVISLSFLIALSSVMQFFICKTSINPRDFKGTTKLVSTGIFRFSRNPMYLSLLLMLIAWALWLGNSLAWLGVIVFILVMNHCQIAREETYLESKFGDEYRRYKQKVRRWL

SEQ ID NO: 269 - DNA, 888 bp, Haemophilus influenzae
atgcgtagatttttattacctgttattttcgtgattgcggcagtcgtttattctagtatcgtcgttgtaacggaaggtacgcgtggcattatgttacgatttaacaaagtacagcgtgatgctgataacaaagtggttgtatatgaaccgggcttgcattttaaagtacctttaattgatagcatcaaagttttagatgcgcgtattcgtactttagatggctctgcaacacgttttgttactgttgagaaaaaagatttgctagtggattcttatgtgaaatggaaaatcagtgattttggtcgattctacacatctactggcggtggcgattatgctcaagctgcaaatttattaagtcgtaaagtaaacgaccgtttacgttctgaaattggttcacgcacgattaaagatattgtttctggtacacgtggagaattaatggaaggggcaaaaaaagctttaagttcaggacaagacagtacggcagaattaggtattgaagtgatcgatgtgcgtgtaaaacaaattaatttaccagatgaagtctcttcttcaatttaccaacgtatgcgtgcagaacgtgatgcagtggcgcgtgaacatcgttctcaagggaaagaaaaagcagcatttattcaagctgatgtagatcgcaaagtgacgttaattcttgctaatgcaaataaaactgcacaagaattacgaggttcaggcgatgcagctgcagcaaaattatattcagatgcttttgctcaagaaccagaattttttacttttgtgcgtagcttaaaagcctatgaagcgagttttgcaaattctgacaatataatgattttaaaaccagatagtgatttcttccgctttatgcaggcaccgaaaaaatag

SEQ ID NO: 270 - protein, 295 aa, Haemophilus influenzae
MRRFLLPVIFVIAAVVYSSIVVVTEGTRGIMLRFNKVQRDADNKVVVYEPGLHFKVPLIDSIKVLDARIRTLDGSATRFVTVEKKDLLVDSYVKWKISDFGRFYTSTGGGDYAQAANLLSRKVNDRLRSEIGSRTIKDIVSGTRGELMEGAKKALSSGQDSTAELGIEVIDVRVKQINLPDEVSSSIYQRMRAERDAVAREHRSQGKEKAAFIQADVDRKVTLILANANKTAQELRGSGDAAAAKLYSDAFAQEPEFFTFVRSLKAYEASFANSDNIMILKPDSDFFRFMQAPKK

SEQ ID NO: 271 - DNA, 1221 bp, Haemophilus influenzae
atgtcacagaacggttcagatcgcgatccttggagtacaccagggcaaagcaacgaccaacagccgggaaattcatccaataataatggatggaataacaatcaaaatcgtggaaatcaagagcaatctccgccagatattgaggagatttttaataatctgcttaaaaaattaggtggtggaaataaaaagagcggtcaaaataatggcagttctcaaggcaatacgccatttcattttggcaaagttattccacttgctgtagcgattggtgcgattatttggggcgtaaacggtttttacaccattaaagaggctgaacgcggtgtggtgcttcgttttggcgagttacattctattgttcaacctggtttgaactggaaaccaacatttgtagataaagtattgccagtaaatgtggagcaagtaaaagagttgcgtacacaaggtgcaatgctgactcaagatgaaaatatggtaaaagtggaaatgaccgtgcaatatcgtgtgcaagatcctgcaaaatatctttttagcgtaacaaatgcagatgatagtttgaatcaagcgacagatagtgcattacgttatgttattggacatatgtctatgaatgatattttaaccacaggtcgctctgtcgtgcgtgaaaatacttggaaagctttgaatgaaattatcaaatcctatgatatgggacttgaggttattgatgtgaacttccaatctgcacgcccacctgaagaagtaaaagatgcgtttgatgatgcaattaaagcgcaggaagatgaacaacgttttattcgtgaagcggaagcctatgcgcgtgagaaagaaccgattgcacgcggtgatgcgcaacgtattcttgaagaagcaacagcttataaagatcgtatcgtgttagatgcaaaaggtgaagtggaacgtttgcaacgcttgttgccagaatttaaggctgcgccagatttactgcgtgagcgtttatatattcagacgatggaaaaagtgatggcaaataccccaaaagtaatgcttgatggcaataatggtaataatttaactgtgttaccgctagagcaaattatgggcaaaaaatcggtaacaagtgcgccaagtgcggtcaattcttcgcctgcttttactgcaccagaacgtcaaaattcttatcagcctcagccgactaccgttgcgccgattcgtcaagggagatttaactaa

SEQ ID NO: 272 - protein, 406 aa, Haemophilus influenzae
MSQNGSDRDPWSTPGQSNDQQPGNSSNNNGWNNNQNRGNQEQSPPDIEEIFNNLLKKLGGGNKKSGQNNGSSQGNTPFHFGKVIPLAVAIGAIIWGVNGFYTIKEAERGVVLRFGELHSIVQPGLNWKPTFVDKVLPVNVEQVKELRTQGAMLTQDENMVKVEMTVQYRVQDPAKYLFSVTNADDSLNQATDSALRYVIGHMSMNDILTTGRSVVRENTWKALNEIIKSYDMGLEVIDVNFQSARPPEEVKDAFDDAIKAQEDEQRFIREAEAYAREKEPIARGDAQRILEEATAYKDRIVLDAKGEVERLQRLLPEFKAAPDLLRERLYIQTMEKVMANTPKVMLDGNNGNNLTVLPLEQIMGKKSVTSAPSAVNSSPAFTAPERQNSYQPQPTTVAPIRQGRFN

SEQ ID NO: 273 - DNA, 663 bp, Haemophilus influenzae
ttggaatccttacccgatgaactgattccagaaaatctatatcaaattgaaacgggtagctcccgtgtttttcagcgtcatcagtgtcgtcggcttgcgcatttattacttttccaacttctaaaaatagcaggaaaatccaccgcacttttatctcaaattcatcgtactgaaagtggcagaccttattttcttgatgagcgaatagattttaatattagccattctggtgattgggtggcggtaatattagatattagaaaagaagaaaaaagtgcggtgggaattgatattgaatttcctaaaataagaaattttacggcgttgatggaacatattgcaccaaaagaagaaattgattggtttcatcatcaacaggattctttgaacgctttttatcgttgttggtgtttgcgagaggctgtattgaaatctcaaggatttgggatcgtaaaattatccaatgttcgtcattttcctgaacaacaaaaaattttttcagattattgtccgcaggggcagttgtggtttactgatgaactccctatttatttagccgcttttgtcaatcatcaagaaaaattaccgcacttttatgaatggaatagagaaagtttacagataaaagaacttgaaaaatatgttctttatgaagtgaattaa

SEQ ID NO: 274 - protein, 220 aa, Haemophilus influenzae
MESLPDELIPENLYQIETGSSRVFQRHQCRRLAHLLLFQLLKIAGKSTALLSQIHRTESGRPYFLDERIDFNISHSGDWVAVILDIRKEEKSAVGIDIEFPKIRNFTALMEHIAPKEEIDWFHHQQDSLNAFYRCWCLREAVLKSQGFGIVKLSNVRHFPEQQKIFSDYCPQGQLWFTDELPIYLAAFVNHQEKLPHFYEWNRESLQIKELEKYVLYEVN

SEQ ID NO: 275 - DNA, 99 bp, Haemophilus influenzae
ttgatttatattgccgtaggcgatgtaggttgtcataaaataaaagtaccactcaaaggtgcttttatattaaaaggatttagtttgtgtgtaaattag

SEQ ID NO: 276 - protein, 32 aa, Haemophilus influenzae
MIYIAVGDVGCHKIKVPLKGAFILKGFSLCVN

SEQ ID NO: 277 - DNA, 1332 bp, Haemophilus influenzae
atgctttacttagaatttttatttttactattaatgctctatatcggtagccgttacggcggtatcggattaggtgttgtttctggtatcggtcttgctatcgaggttttcgtatttcgtatgcctgtggggaaagcaccgattgatgttatgcttatcattcttgcagtggtgacttgcgcatccgtacttgaagcagctggcggtttgaaatttatgttacaaattgctgaacgcattctccgtaaaaatccaaaacgtgtcactttactaggtccattagtcgtctatttattaacctttatgcttggtacgggtcactctgtttacacaattatgccaatcatcggcgatgttgcattgaaaaacaaaattcgtccagaacgtccaatggcggcgtcttcggtagcatcgcaattagccatcacatcaagcccactttctgcagctgttgtattttatctaggtaaaattacagcaatgcccgcttttgagcatattagtttattagatattatttgtgtaaccgttcctgctactttagcgggtacgattgcgctttctttatacagtatgcgtcgtggtaaagagttagaacaagatcctgaatatcaacgtcgtttacaagatccagtatggcgcgaacgtattttaaatactaccagtacaacattgaatgaaacccttccgcaaggggcaaaaaaatctgtttacctatttttacttgctttagttgtgattgttgcgattgcgatgattcctgaaattcgcactatcggtagcggaaaagcaatttcaatgtcacttatcattcaaatgatgatgctttgctttggcggtgtgattttacttgcaacgaaaacgaatcctcaaatcgtgcaaaatggtgtggtatttaagtcaggtatggtagcagcgattgcaatttatggtattgcgtggatgagcgacacttacttcaaatatgcaatgccagaatttaaagccgcgattactgatatggtgcaaacttacccttggacattcgcattggcgttatttgcagtctcagttgtaattaatagccaagcagcaacagccgtaatgttattacctgtgggtattggcttaggtattccagcaccaatcttagttggtttaatgcctgcaacttatgcgtatttcttcattccaaattatccgtcagatattgcaacagtaaactttgacgtaacgggtacaacaaaaattggtaaatattattttaaccacagttttatggtgccaggtttaattggggttgttgttgcttgcttagttggtgtttctgtggcggaattagtgattcgctaa

SEQ ID NO: 278 - protein, 443 aa, Haemophilus influenzae
MLYLEFLFLLLMLYIGSRYGGIGLGVVSGIGLAIEVFVFRMPVGKAPIDVMLIILAVVTCASVLEAAGGLKFMLQIAERILRKNPKRVTLLGPLVVYLLTFMLGTGHSVYTIMPIIGDVALKNKIRPERPMAASSVASQLAITSSPLSAAVVFYLGKITAMPAFEHISLLDIICVTVPATLAGTIALSLYSMRRGKELEQDPEYQRRLQDPVWRERILNTTSTTLNETLPQGAKKSVYLFLLALVVIVAIAMIPEIRTIGSGKAISMSLIIQMMMLCFGGVILLATKTNPQIVQNGVVFKSGMVAAIAIYGIAWMSDTYFKYAMPEFKAAITDMVQTYPWTFALALFAVSVVINSQAATAVMLLPVGIGLGIPAPILVGLMPATYAYFFIPNYPSDIATVNFDVTGTTKIGKYYFNHSFMVPGLIGVVVACLVGVSVAELVIR

SEQ ID NO: 279 - DNA, 102 bp, Haemophilus influenzae
atggctttagaagaagaatttgatattgaaattcctgatgaagaagctgaaaaaattaccactgttcaatctgcgattgattacgtgcaaaacaatcaataa

SEQ ID NO: 280 - protein, 33 aa, Haemophilus influenzae
MALEEEFDIEIPDEEAEKITTVQSAIDYVQNNQ

SEQ ID NO: 281 - DNA, 474 bp, Haemophilus influenzae
  misc_feature 452, 453, 454, 455, 456: n is any nucleotide
atgcaaggtaaaattgctttagtgacaggggctacccgtggtatcggtcgtgcgattgcagaagaacttagttcaaaaggtgcgtttgtaattggtaccgcaacctctgaaaagggtgcagaggcgatctcggcttatttaggggataaaggtaaaggtttagttttaaacgtaacggataaagaatctatcgaaaccttacttgaacaaattaaaaatgattttggcgatattgatattctcgtgaataacgcaggtattactcgcgataatttattgatgcgtatgaaagatgaggaatggtttgatattatgcaaactaacttaacttcggtgtatcatctttctaaagccatgttacgttcaatgatgaaaaaacgttttggtcgtatcatcaatattggttcagtggttggttcaacgggtaatccaggacaaactaactattgtgnnnnncattcattcattaattaa

SEQ ID NO: 282 - protein, 157 aa, Haemophilus influenzae
  VARIANT 151, 152: Xaa is any amino acid
MQGKIALVTGATRGIGRAIAEELSSKGAFVIGTATSEKGAEAISAYLGDKGKGLVLNVTDKESIETLLEQIKNDFGDIDILVNNAGITRDNLLMRMKDEEWFDIMQTNLTSVYHLSKAMLRSMMKKRFGRIINIGSVVGSTGNPGQTNYCXXHSFIN

SEQ ID NO: 283 - DNA, 939 bp, Haemophilus influenzae
atgaaaaaattcgcaatggtcttcccaggtcaaggctcccaaactgtcggtatgcttgctgatcttgcaactgaatatccaatcgttattgaaacatttaaacaagcatctgatgcgcttggttatgatttatggtatcttgttcaacaaggtccagctgaagaacttaataaaacttggcaaactcagcccgcacttttagctgcttcagtcgctatttatcgcgtatggcaagaaaaatttcctcaattaaaaccagaagtaatggcaggccatagcttgggtgagtattctgccttggtttgtgctggcgtgttggatttccaagatgcgattaaattagtggaattgcgcggaaaattaatgcaacaagctgtgcctgaaggcacaggtgcaatgtatgcaatcattggtttagataatgaagcaattattaatgcttgcaaacaagcagaggaaggcgaagtcgtatctgctgtgaactttaactcaccaggccaagtcgttatcgctggcgcgaaagctgcagttgagcgtgcggctgcattatgtaaagaagcgggtgctaagcgcgcattgccattagcggtgagcgtgccttctcactgcgcattaatgaaacctgcagcagatcaattagctgtaacacttgaaggtattacgcttaatgcgccagcaacagctgtattaaataacgttgatgtgaaagcagaaactgaaggtgccgaaattcgtaccgcacttgttcgtcagttatatagtccagttcgttggactgaaacagttgaaaaaatggcgcaagatggcgttctagtgcttgttgaagtggggccaggtaaagtattaaatggtttaaccaaacgcattgtgggtgatttacaagctatatctgtaaatgatgtcgcatcattcaatgcggtagaagaatttttagtgtaa

SEQ ID NO: 284 - protein, 312 aa, Haemophilus influenzae
MKKFAMVFPGQGSQTVGMLADLATEYPIVIETFKQASDALGYDLWYLVQQGPAEELNKTWQTQPALLAASVAIYRVWQEKFPQLKPEVMAGHSLGEYSALVCAGVLDFQDAIKLVELRGKLMQQAVPEGTGAMYAIIGLDNEAIINACKQAEEGEVVSAVNFNSPGQVVIAGAKAAVERAAALCKEAGAKRALPLAVSVPSHCALMKPAADQLAVTLEGITLNAPATAVLNNVDVKAETEGAEIRTALVRQLYSPVRWTETVEKMAQDGVLVLVEVGPGKVLNGLTKRIVGDLQAISVNDVASFNAVEEFLV

SEQ ID NO: 285 - DNA, 129 bp, Haemophilus influenzae
ttgaccgcactttttgtgttaaatgtcaggatttcgcctgacggcgacttactttttctttgttttgccaaagaaaaagtaagcaaaaagaaaagcaaccctgctttgccttgtttcctgaaaaaatag

SEQ ID NO: 286 - protein, 42 aa, Haemophilus influenzae
MTALFVLNVRISPDGDLLFLCFAKEKVSKKKSNPALPCFLKK

SEQ ID NO: 287 - DNA, 957 bp, Haemophilus influenzae
ttgagtatgaatagtagaattttatccaccggtagctatctgccgagccatattcgcacaaatgcggatttagaaaaaatggttgatacatcagatgaatggattgtcactcgttctggtatccgtgaacgtcgtatcgcagcggaagatgaaactgttgcaacaatgggatttgaagcggcaaaaaatgcgatcgaagctgctcaaattaatcctcaagatattgaactgattattgttgcaactacaagtcactcacatgcttatccaagtgcggcttgccaagtgcaaggtttattaaatattgatgatgcgatttcttttgatttagccgcagcttgcacaggctttgtctatgctttgagcgtagctgatcaatttattcgtgcaggcaaagtgaaaaaagccttagtgataggctcagatctcaattctcgtaaattagatgaaacagatcgcagcactgttgtgctatttggtgatggtgcgggtgctgtaattttagaagcgagtgaacaagaaggaattatctccacccatttacacgcttcagcaaataaaaataatgcccttgttttagctcagccagaacgtggtatagaaaaatctggctatatcgagatgcaaggtaacgaaacgttcaaattggcagttcgtgaactttcaaatgtagtggaggaaacactttcagccaataatttagataaaaaagatttagactggcttgtgccacaccaagcaaatttacgtattattacagcgacagctaaaaaattagaaatggatatgtcgcaagtggtggtaacgttagataaatacgctaataacagtgcagcaacagtgcctgtcgctttagatgaggctgttcgagatggccgtattcaacgtgggcagttactattattagaagcctttggcggtggttggacttggggttcagcgttagtgagattttag

SEQ ID NO: 288 - protein, 318 aa, Haemophilus influenzae
MSMNSRILSTGSYLPSHIRTNADLEKMVDTSDEWIVTRSGIRERRIAAEDETVATMGFEAAKNAIEAAQINPQDIELIIVATTSHSHAYPSAACQVQGLLNIDDAISFDLAAACTGFVYALSVADQFIRAGKVKKALVIGSDLNSRKLDETDRSTVVLFGDGAGAVILEASEQEGIISTHLHASANKNNALVLAQPERGIEKSGYIEMQGNETFKLAVRELSNVVEETLSANNLDKKDLDWLVPHQANLRIITATAKKLEMDMSQVVVTLDKYANNSAATVPVALDEAVRDGRIQRGQLLLLEAFGGGWTWGSALVRF

SEQ ID NO: 289 - DNA, 228 bp, Haemophilus influenzae
ttgagcgaagcgagttcagcaaatttccgtgaagcaaatttctattttttcaggaaacaaggcaaagcagggttgcttttctttttgcttactttttctttggcaaaacaaagaaaaagtaagtcgccgtcaggcgaaatcctgacatttaacacaaaaagtgcggtcaatttttaccgcactttaaaatcatcaataattatatcaaatcaactaaaatctcactaa

SEQ ID NO: 290 - protein, 75 aa, Haemophilus influenzae
MSEASSANFREANFYFFRKQGKAGLLFFLLTFSLAKQRKSKSPSGEILTFNTKSAVNFYRTLKSSIIISNQLKSH

SEQ ID NO: 291 - DNA, 171 bp, Haemophilus influenzae
atggctgttcaacaaaacaaaaaatctcgttcacgtcgtgatatgcgtcgttcacacgatgctttaacaactgctgctgtatcagtagataaagcaagcggtgaaactcacttacgccaccacgtaactgcagacggttactatcgtggtcgtaaagtgatcaataagtaa

SEQ ID NO: 292 - protein, 56 aa, Haemophilus influenzae
MAVQQNKKSRSRRDMRRSHDALTTAAVSVDKASGETHLRHHVTADGYYRGRKVINK

SEQ ID NO: 293 - DNA, 525 bp, Haemophilus influenzae
atgcaaaaggtaaaactacccctaaccgttgatccagtaaaagatgctcaaagacggcttgattatgttggttattattcggcaaatcagcttgagcgtttggcggaatcagtggtaaacgtgctcagcgatgcacaggtaacattatcgttttatgttgatccacaaaaattagtggtgatgaaaggtaaagtacagattgatgtcgatcttgaatgtcagcgttgtaacgaaccttacaaacaaacattggaatgtgagtttacttatagtccagtggctaattgggatcaggctgatgacttgcccgaaatttatgagccaatcgagttcaatgagtttggcgaaatagatttaattggcacggtggaagatgagctaattttagctttgccgcttgtcccaatgcattcatctgaacactgtgaagtgtccgcgcaggaacaggtttttggcgaattgcctgaagaattggcaaaaaaaccgaacccgttcgctgtattagctaatttaaagcaaaagtaa

SEQ ID NO: 294 - protein, 174 aa, Haemophilus influenzae
MQKVKLPLTVDPVKDAQRRLDYVGYYSANQLERLAESVVNVLSDAQVTLSFYVDPQKLVVMKGKVQIDVDLECQRCNEPYKQTLECEFTYSPVANWDQADDLPEIYEPIEFNEFGEIDLIGTVEDELILALPLVPMHSSEHCEVSAQEQVFGELPEELAKKPNPFAVLANLKQK

SEQ ID NO: 295 - DNA, 873 bp, Haemophilus influenzae
atgatgacttcaaattcttattggcaacgcttaaaagtggcatttcaatatgtcatgccacaaatttatttaactcaaattgctggctggtttgctaaacaaaaatggggcaaaataacacattttgtaattaaagcttttgcgaaaaaatacaacattgatatgagcattgcgcaaaaagaacaattttctgattacgcaagttttaatgaattttttattcgtccgttaaaagaaaacgcacgtccaattaatcaaaatccaaccgcactttgtttaccagcagacggtcgcattagtgagtgcggtcatattgacgataatcttttattgcaagctaaggggcattttttcagcctagaagacttattggcagaagataaagaattagtggaaacctttaaaaatggggaatttgccactacttatctttctcctcgtgattatcaccgagtacatatgccgtgcgatggcacgctacgtaagatgatttatgtgccaggcgatttattctctgtgaatccatttttagcccaacatgtaccaaatttatttgcgcgtaatgaacgtgtgatttgtgtatttgatactgaatttggcacaatggtacaaattttagtgggtgcaaccatcactgcaagtattggcacaacttgggcaggcgtaattaatccaccacgccacaacgaagtgaaaacttggacttatgaaggcgaaagtgcggtcaaattattgaaaggtcaagaaatgggttggttccaacttggttcgacagtgattaatttattccaagccaatcaagtgcgtttagctgatcatttaagcgtgaatgaacctgttcgcatgggcgaaatcttggcatataaaaaataa

SEQ ID NO: 296 - protein, 290 aa, Haemophilus influenzae
MMTSNSYWQRLKVAFQYVMPQIYLTQIAGWFAKQKWGKITHFVIKAFAKKYNIDMSIAQKEQFSDYASFNEFFIRPLKENARPINQNPTALCLPADGRISECGHIDDNLLLQAKGHFFSLEDLLAEDKELVETFKNGEFATTYLSPRDYHRVHMPCDGTLRKMIYVPGDLFSVNPFLAQHVPNLFARNERVICVFDTEFGTMVQILVGATITASIGTTWAGVINPPRHNEVKTWTYEGESAVKLLKGQEMGWFQLGSTVINLFQANQVRLADHLSVNEPVRMGEILAYKK

SEQ ID NO: 297 - DNA, 1371 bp, Haemophilus influenzae
atgactaaacattatgattacatcgctattggcggtggcagtggcggtattgcgtctctaaatcgagcagcaagttatggaaaaaaatgtgcaatcattgaagcaaaacatcttggcggaacttgtgtaaatgtcggttgcgtacctaaaaaagtgatgttttatggcgcgcatattgcagaagcaatcaacaattatgcgccagattatggttttgatgttgaagtgaaaaaatttgatttttcaaaactgattgaaagtcgccaagcctatattagtcgtatccatacatcttataataatgtattagcgaaaaataatattgatgtaattaatggtttcggaaaatttgtcgatgcgcataccgtcgaagtaacgcttgctgatggtacaaaagaacaaataaccgcagatcatattttaatcgcaactggtggtcgtccatatcgtccaaatattaaaggacaagaatacggcattgattcagatggtttctttgcattaacagaattaccaaaacgcgctgcggttattggtgcaggctatattgctgttgaactttctggcgtattaaacagcttaggcgtggaaacacatttattagtgcgtcgccatgcgccaatgcgtaatcaggatccattaatcgtagaaacattagtggaagtgcttacgcaagatggaattcaattacataccaattctaccccatctgaaattgtaaaaaatgcagatggttcacttactgtaagatgtgatggtcaatctgatgttaccgtagattgcgttatttgggcggcaggtcgtgttccaacgacagataaaattggcttagaaaatgcaggtgtagaaacaaatgaacacggttatgtcaaagtagataaatatcaaaatactaatgtgaaaggcatttatgcggtaggcgatattatcgaaaacggtattgaattaacaccaattgcagttgcagcaggtcgccgcctttcagagcgtttatttaataataaaccgactgaatatttagattacagtttagttccaaccgttgtatttagccatccgcctatcggcactgtaggtttaactgaaccgcaagcgattgagcagtacggcgcagaaaatgttaaagtatataaatcttctttcacagcgatgtacactgcggtaactcaacatcgccaaccgtgcaaaatgaaattagtttgtgtgggtaaagatgaaaaagttgtgggtttacatggtattggtttcggtgtagatgaaatgattcaaggatttgcagtagcaatcaaaatgggcgcaacaaaagctgattttgacaatacggtggcaattcatccaacaggttcagaggaatttgtaacaatgcgttaa

SEQ ID NO: 298 - protein, 456 aa, Haemophilus influenzae
MTKHYDYIAIGGGSGGIASLNRAASYGKKCAIIEAKHLGGTCVNVGCVPKKVMFYGAHIAEAINNYAPDYGFDVEVKKFDFSKLIESRQAYISRIHTSYNNVLAKNNIDVINGFGKFVDAHTVEVTLADGTKEQITADHILIATGGRPYRPNIKGQEYGIDSDGFFALTELPKRAAVIGAGYIAVELSGVLNSLGVETHLLVRRHAPMRNQDPLIVETLVEVLTQDGIQLHTNSTPSEIVKNADGSLTVRCDGQSDVTVDCVIWAAGRVPTTDKIGLENAGVETNEHGYVKVDKYQNTNVKGIYAVGDIIENGIELTPIAVAAGRRLSERLFNNKPTEYLDYSLVPTVVFSHPPIGTVGLTEPQAIEQYGAENVKVYKSSFTAMYTAVTQHRQPCKMKLVCVGKDEKVVGLHGIGFGVDEMIQGFAVAIKMGATKADFDNTVAIHPTGSEEFVTMR

SEQ ID NO: 299 - DNA, 600 bp, Haemophilus influenzae
atggcattagtaaacaaaataaaaacattatcatcagtaggtattctagcggctacattatttcttgcaggctgccaagcacaatcaaatatattagcatttacaccgcctgcgccaagtgcttcaatgaatgttaatcgaactgccgttgtatctgttacaacaaaagatagccgcgcaatacaagagattgcgagttatacgaaacacggggaactgattaaattaaatgcatccccaagtgttacacaattatttcagcaagtgatgcagcaaaatttaattagtaaaggctttagaattgggcaattaaatggttcaaatgcgtgggtaactgtggatgtgcgtgaatttggtacgcaagtagaacaaggtaatcttcgttataaacttaataccaaaattcaagcgacagtttatgtacaaggtgcgaaaggttcgtataataaatcatttaatgtcacgcactcacaagagggcgtatttaatgcgggcaatgatgaaattcataaagtgctatctcaaacttttaatgatattgtgaacaatatttatcaagatcaagaagttgcggctgcgattaaccaatattctaattaa

SEQ ID NO: 300 - protein, 199 aa, Haemophilus influenzae
MALVNKIKTLSSVGILAATLFLAGCQAQSNILAFTPPAPSASMNVNRTAVVSVTTKDSRAIQEIASYTKHGELIKLNASPSVTQLFQQVMQQNLISKGFRIGQLNGSNAWVTVDVREFGTQVEQGNLRYKLNTKIQATVYVQGAKGSYNKSFNVTHSQEGVFNAGNDEIHKVLSQTFNDIVNNIYQDQEVAAAINQYSN

SEQ ID NO: 301 - DNA, 312 bp, Haemophilus influenzae
atgtcaattcaacaaattattgagcaaaaaattcaaaaagaatttcaaccgcactttttagcaatagaaaatgaaagccatttacatcactctaatcgaggttctgaatcacattttaaatgcgttattgtcagcgcagcctttaaaaatattcgaaaagtacaacgtcatcagcgtatttatcaattattgaacgaagaattaaatcatagtattcacgcattagcattacatttattcactccagaagaatggaaagcacaaaatgaaactgtaccgcactcaacaaaatgtgcaggtattggtcgttaa

SEQ ID NO: 302 - protein, 103 aa, Haemophilus influenzae
MSIQQIIEQKIQKEFQPHFLAIENESHLHHSNRGSESHFKCVIVSAAFKNIRKVQRHQRIYQLLNEELNHSIHALALHLFTPEEWKAQNETVPHSTKCAGIGR

SEQ ID NO: 303 - DNA, 1230 bp, Haemophilus influenzae
atgcgtccttcaatgaaggtgcgcgaaggcgatgttgtgaaaaaaggtcaagtactttttgaagacaaaaaaaatcctggtgtaatttttacagcccctgcaagcggtaccatcactgcaatcaatcgtggcgaaaaacgtgtattacaatctgttgttattaatgtagaaggtgatgaaaaaatcacttttgcaaaatatagcacagaacaattgaatacactttcttctgaacaagtaaaacaaaacttgatagaatctggcttatggacggcattacgtactcgtccatttagtaaagttccatccattgaaagtgaagcatcttctatttttgtaaatgcgatggataccaatccattagcagccgatccctctgtcgtattaaaagaatattcgcaagacttcactaacggtttaaccgtattaagtcgtctattcccttcaaaaccattacacttatgtaaagcgggcgattctaatattccaactgctgatcttgaaaatttacagattcatgattttactggtgttcatccagctggtcttgtagggacgcatattcactttattgatcctgtcggtattcaaaaaactgtatggcatatcaattatcaagatgtgatcgctgtaggtaaattatttacaacaggcgaactttattcagaacgagtaatttctcttgcaggtcctcaagtgaaagaacctcgtttagtacgtacaataatcggtgctaatctttctcaattaacccaaaatgaattaagtgcgggtaaaaatcgtgtaatttctggctcagttctttgtggtcaaatagcaaaagattcacatgattatttaggtcgctatgctttgcaagtatcagtaatcgctgaaggtaatgaaaaagaattttttggttggattatgccacaagccaataaatattctgtgactcgtaccgtattaggccacttcagtaaaaaattgtttaattttactacttcagaaaatggtggcgaacgtgcaatggtgccaatcggtagctatgagcgcgtaatgccattggacattttacctacattattattacgtgatttaatcgtgggcgataccgatggtgctcaagagttaggttgtctggaattagacgaagaagacttggcgttatgttctttcgtttgtccaggcaaatatgaatacggttcaatcttgcgtcaagtcttagataagattgagaaggaaggttaa

SEQ ID NO: 304 - protein, 409 aa, Haemophilus influenzae
MRPSMKVREGDVVKKGQVLFEDKKNPGVIFTAPASGTITAINRGEKRVLQSVVINVEGDEKITFAKYSTEQLNTLSSEQVKQNLIESGLWTALRTRPFSKVPSIESEASSIFVNAMDTNPLAADPSVVLKEYSQDFTNGLTVLSRLFPSKPLHLCKAGDSNIPTADLENLQIHDFTGVHPAGLVGTHIHFIDPVGIQKTVWHINYQDVIAVGKLFTTGELYSERVISLAGPQVKEPRLVRTIIGANLSQLTQNELSAGKNRVISGSVLCGQIAKDSHDYLGRYALQVSVIAEGNEKEFFGWIMPQANKYSVTRTVLGHFSKKLFNFTTSENGGERAMVPIGSYERVMPLDILPTLLLRDLIVGDTDGAQELGCLELDEEDLALCSFVCPGKYEYGSILRQVLDKIEKEG

SEQ ID NO: 305 - DNA, 1236 bp, Haemophilus influenzae
atgggtttgaaaaatctttttgaaaaaatggaacccgcgtttttacccggtggtaaatacagcaagctttatccgatctttgaatcgatttataccttgctttatacaccaggtacggtaacgcacaaaaacactcacgttcgtgatgcgttagattcaaaacgtatgatgattacggttttccttgcgttgttccctgcgattttctatgggatgtacaatgtgggtaaccaagcgattccagcgttaaatcaattaggcaatttagatcaactaattgctaacgattggcattatgctcttgcaagttcattaggtttagatttaactgccaatgcaacttggggctctaaaatggctcttggagcaattttctttttaccaatttacttagtggtatttaccgtttgtactatttgggaattgttattctctgtggttcgtggtcacgaagtaaatgaaggaatgttcgtttcaaccattttatttgccttgatcgttccaccaacattgccactatggcaagccgcattaggtattacttttggtatcattgttgcaaaagaaatttttggtggcgtaggtcgtaactttatgaaccctgcacttgctggtcgtgcgttcttattcttcgcctatccagctcaaatttcaggcgatacggtttggactgccgcagatggtttctctggtgcaaccgcactttcacagtggtcacaaggtggtcaaggtgcattgcaacataccgtaacaggcgctccaattacttggatggatgcttttgttggtaacttacctggttcaatgggggaagtttctacccttgcaattttaattggcggtgctgttattgtattcactcgcattgcagcttggcgcattattgctggtgtgatgattggcatgattgcaacctcaaccttgtttaacctaattggctcagagactaaccctatgttctcaatgccttggcattggcactttgttttaggtggatttgcattgggtatggtatttatggcgaccgatcctgtttcagcatcttttactaatactggtaaatggtggtacggtgcattaattggcgtaatggctgtattaattcgtactgtaaacccagcctatccagaaggaatgatgttagcgattttatttgcaaacttatttgcaccgattttcgactacatcgttgttcaagcaaatatcaaacgtcggagagcaagaacaaatggctaa

SEQ ID NO: 306 - protein, 411 aa, Haemophilus influenzae
MGLKNLFEKMEPAFLPGGKYSKLYPIFESIYTLLYTPGTVTHKNTHVRDALDSKRMMITVFLALFPAIFYGMYNVGNQAIPALNQLGNLDQLIANDWHYALASSLGLDLTANATWGSKMALGAIFFLPIYLVVFTVCTIWELLFSVVRGHEVNEGMFVSTILFALIVPPTLPLWQAALGITFGIIVAKEIFGGVGRNFMNPALAGRAFLFFAYPAQISGDTVWTAADGFSGATALSQWSQGGQGALQHTVTGAPITWMDAFVGNLPGSMGEVSTLAILIGGAVIVFTRIAAWRIIAGVMIGMIATSTLFNLIGSETNPMFSMPWHWHFVLGGFALGMVFMATDPVSASFTNTGKWWYGALIGVMAVLIRTVNPAYPEGMMLAILFANLFAPIFDYIVVQANIKRRRARTNG

SEQ ID NO: 307 - DNA, 735 bp, Haemophilus influenzae
atggctaagtttaataaagacagcgtaggcggcacaatccttgttgtgctactactgagtttagtttgttccattattgttgctggttccgcagtaatgttaaagcctgcacaagaagaacaaaaattgcttgataaacaaaaaaatattttaaatgtagctggtcttttacaagaaaacacgaatgtaaaagaaacttatgcaaaatttatcgagccccgtttcgttgatttagcaacgggtgaatacacacaacaagcagatgatagccaacaagcaattcctgctgatgcggataaagcacgtattcgttctcgtagcaaaacaactgaaatttatcttgtaaaagatgaacagggtcaaactcaacaagttattttaccaatttatggcactggcttgtggtcagtgatgtatggcttagtatctgttcaaccagatggtaatactattaatggaatcacttactatcaacacggagaaacaccgggattgggcggagaaattgaaaatccaaactgggcaagtctatttaaaggtaaaaaattatttgatgagcaacatcaacctgccattcgtattgtgaaaggtcaagctccacaagatgaacatagcattgatggtttatctggtgcaactttaacaggtaatggtgttcaaggtacctttaattattggttcagcaaagatggctttggtccatatcttgaaaaacttcattcaggagcaaactaa

SEQ ID NO: 308 - protein, 244 aa, Haemophilus influenzae
MAKFNKDSVGGTILVVLLLSLVCSIIVAGSAVMLKPAQEEQKLLDKQKNILNVAGLLQENTNVKETYAKFIEPRFVDLATGEYTQQADDSQQAIPADADKARIRSRSKTTEIYLVKDEQGQTQQVILPIYGTGLWSVMYGLVSVQPDGNTINGITYYQHGETPGLGGEIENPNWASLFKGKKLFDEQHQPAIRIVKGQAPQDEHSIDGLSGATLTGNGVQGTFNYWFSKDGFGPYLEKLHSGAN

SEQ ID NO: 309 - DNA, 627 bp, Haemophilus influenzae
atgtctggaaaaacaagttataaagatctgttgttagcgccaattgctaaaaacaaccctattgcattgcaaatcttagggatttgttctgcattagctgtaacaacaaaattagaaactgcttttgttatggcgattgcagttaccttagtaactggattatcaaacttatttgtttccctaatccgcaattatatccctaacagcattcgtattattgtacagctcgcaatcatcgcttcgcttgttatcgtagtggatcaaattctaaaagcctatgcttatggtttatctaaacaactttcagtattcgttggtttgattattactaactgtatcgtaatggggcgtgctgaagcatttgcgatgaaatcccctccagttgaaagttttgtagatggtatcggaaatggcttaggttatggttcaatgttaattatcgtagcatttttccgtgaacttatcggttcaggtaaattatttggtatgacgattttcgaaactattcaaaatggtggctggtatcaagcaaatggtttattcctacttgcaccaagtgcattctttatcatcggatttgtgatctggggattaagaacttggaaaccagaacaacaggagaagtaa

SEQ ID NO: 310 - protein, 208 aa, Haemophilus influenzae
MSGKTSYKDLLLAPIAKNNPIALQILGICSALAVTTKLETAFVMAIAVTLVTGLSNLFVSLIRNYIPNSIRIIVQLAIIASLVIVVDQILKAYAYGLSKQLSVFVGLIITNCIVMGRAEAFAMKSPPVESFVDGIGNGLGYGSMLIIVAFFRELIGSGKLFGMTIFETIQNGGWYQANGLFLLAPSAFFIIGFVIWGLRTWKPEQQEK

SEQ ID NO: 311 - DNA, 597 bp, Haemophilus influenzae
atggaacattatattagcctatttgttaaggcagtcttcattgaaaatatggcactttctttcttcttaggaatgtgtactttcttagcggtatctaaaaaggtgtccactgcgtttggtcttgggattgcggtaactttcgttcttgggatcgcagtgccagtaaaccaattaatttatgcaaatgtactaaaagaaaatgctttaattgaaggtgtagatttatcattcttaaacttcatcactttcattggggttattgctggtttagtgcaaattcttgaaatggtattagataaatttatgccatctctttataacgcattagggattttcttacctttaatcgcagtaaactgtgcgatctttggtggggtatctttcatggttcaacgtgattacaatttccctgaatctatcgtgtatggtttcggctcaggtttaggttggatgttagcgattgtagcgcttgctggcttaacggaaaaaatgaaatacgctgatattcctgctggattaaaaggtttaggtattacctttatctcggttggtttaatggctctaggctttatgtctttctctggtattcaattataa

SEQ ID NO: 312 - protein, 198 aa, Haemophilus influenzae
MEHYISLFVKAVFIENMALSFFLGMCTFLAVSKKVSTAFGLGIAVTFVLGIAVPVNQLIYANVLKENALIEGVDLSFLNFITFIGVIAGLVQILEMVLDKFMPSLYNALGIFLPLIAVNCAIFGGVSFMVQRDYNFPESIVYGFGSGLGWMLAIVALAGLTEKMKYADIPAGLKGLGITFISVGLMALGFMSFSGIQL

SEQ ID NO: 313 - DNA, 1236 bp, Haemophilus influenzae
atgagcgattcagtaattcttgcactcggtattgccgcattcacggttattgtattagtgttagtggcaatcatcttatttgcgaaatcaaaattagtcgattctggtgatattactatcgacatcaatgacgatcctgaaaaagcgatcacattacctgcaggtggcaaattattaggggctttagcaagtaaaggtattttcgtgtcttctgcttgcggcggcggtggctcttgtggtcaatgtattgttaaagtgaaaaatggcggtggagaaattcttccaaccgaactttctcacattaacaaacgtgaagcaaaagagggatatcgcttagcttgtcaagttaatgtaaaaggtaatatggaagttgaacttccagaagaaatcttcggcgtgaaaaaatgggaatgtactgttatttctaacgataacaaagcaacctttatcaaagagcttaaattggctattcctgaaggcgaggaagtgcctttccgtgcaggtggttatatccaaatcgaagctgagccacatgtggtgaactataaagattttgatattccagaagaataccacgaagactgggataaatacgatttatggcgttatgtctctaaagtggacgagcatattatccgtgcttactcaatggcttcataccctgaagagaaaggtatcattatgcttaacgttcgtattgcgactccaccaccacgccaacctgatgcgcctccgggtcaaatgtcttcttatatttggtcattaaaagcaggagataaagtcacaatttctggtccatttggtgaattctttgcgaaagaaactgatgcagaaatggtatttatcggtggtggtgcgggtatggctccaatgcgttcacatatcttcgaccaattaaaacgtttacattctaaacgtaaaatgtcgttctggtatggtgcacgttctaaacgtgaaatattctatcaagaagactttgaccaattacaagctgaaaatccaaactttgtatggcacgtggcactttcagatgcattgcctgaagataattggactggctatacaggctttattcacaatgtactttatgaaaactacttgaaaaatcatgaagcaccagaagactgtgaatactatatgtgtgggcctccagtgatgaatgcagctgtaattaaaatgttgaaagatcttggtgttgaagatgaaaacattttattagatgactttggtggctga

SEQ ID NO: 314 - protein, 411 aa, Haemophilus influenzae
MSDSVILALGIAAFTVIVLVLVAIILFAKSKLVDSGDITIDINDDPEKAITLPAGGKLLGALASKGIFVSSACGGGGSCGQCIVKVKNGGGEILPTELSHINKREAKEGYRLACQVNVKGNMEVELPEEIFGVKKWECTVISNDNKATFIKELKLAIPEGEEVPFRAGGYIQIEAEPHVVNYKDFDIPEEYHEDWDKYDLWRYVSKVDEHIIRAYSMASYPEEKGIIMLNVRIATPPPRQPDAPPGQMSSYIWSLKAGDKVTISGPFGEFFAKETDAEMVFIGGGAGMAPMRSHIFDQLKRLHSKRKMSFWYGARSKREIFYQEDFDQLQAENPNFVWHVALSDALPEDNWTGYTGFIHNVLYENYLKNHEAPEDCEYYMCGPPVMNAAVIKMLKDLGVEDENILLDDFGG

SEQ ID NO: 315 - DNA, 1041 bp, Haemophilus influenzae
atgaaaaaattaataagcggtatcatagcggtagcaatggcattaagtcttgctgcttgtcaaaaagaaacaaaagttatctctttaagcggtaaaacaatggggacaacttatcatgttaaataccttgatgatggttcaataacagcaacatctgaaaagacgcatgaagaaattgaagcaatcttaaaagatgtgaacgcgaaaatgtccacttacaaaaaagattcggaattgagccgcttcaatcaaaatacccaagtgaacacaccgattgagatttcagcagattttgccaaagtattagctgaagcgattcgtttaaataaagtgaccgaaggtgcgttggatgtaactgttggtccagttgtaaatttatggggatttggtcctgaaaaacgcccagaaaagcaacctacaccagaacaattagctgaacgccaagcgtgggttggcattgataaaattaccctagatactaacaaagaaaaagctacattaagtaaagcacttcctcaagtttacgtagatttatcgtcaattgctaaaggctttggcgttgatcaggtggctgaaaagttagaacaattaaatgctcagaattacatggttgaaatcggcggtgaaattcgtgcgaaaggaaaaaatattgaaggtaaaccttggcagattgccattgaaaaaccaactacaacaggcgaaagagcggttgaagctgtcattggattaaacaatatgggaatggcaagttctggcgattaccgtatttactttgaagaaaatggcaaacgctttgcgcacgaaattgatccgaaaacaggttatccaattcagcatcatttagcctcaattacggtacttgcaccaacctcaatgactgcagatggcttatctacagggttatttgtgctgggggaagacaaggcgttagaagtggctgagaaaaataatcttgccgtttatttaatcattagaacagataatggttttgttaccaaatcatcctctgctttcaaaaaattaacagaaacaaaagaatag

SEQ ID NO: 316 - protein, 346 aa, Haemophilus influenzae
MKKLISGIIAVAMALSLAACQKETKVISLSGKTMGTTYHVKYLDDGSITATSEKTHEEIEAILKDVNAKMSTYKKDSELSRFNQNTQVNTPIEISADFAKVLAEAIRLNKVTEGALDVTVGPVVNLWGFGPEKRPEKQPTPEQLAERQAWVGIDKITLDTNKEKATLSKALPQVYVDLSSIAKGFGVDQVAEKLEQLNAQNYMVEIGGEIRAKGKNIEGKPWQIAIEKPTTTGERAVEAVIGLNNMGMASSGDYRIYFEENGKRFAHEIDPKTGYPIQHHLASITVLAPTSMTADGLSTGLFVLGEDKALEVAEKNNLAVYLIIRTDNGFVTKSSSAFKKLTETKE

SEQ ID NO: 317 - DNA, 261 bp, Haemophilus influenzae
atgcaaactttattttttactttaatcgctttcgtcgcaattatattgttgatgtctatcggatttattatcaaaaaacaaagtttaaaaggcagctgcggtggtttatctacccttggtattgccaaagcttgcgattgtgataaaccttgcgacacgcttcaatcaaaattagatgcaggcgatgaacaagcgaaaactgaatatgagcaaaaatttgcgaaaaaagatgatgactcgcaattttatgaagtgaaataa

SEQ ID NO: 318 - protein, 86 aa, Haemophilus influenzae
MQTLFFTLIAFVAIILLMSIGFIIKKQSLKGSCGGLSTLGIAKACDCDKPCDTLQSKLDAGDEQAKTEYEQKFAKKDDDSQFYEVK

SEQ ID NO: 319 - DNA, 1152 bp, Haemophilus influenzae
atgttaatttcaaatacttataatcaacactttcctcaattgacgcaagagcagattgcgagcaatgcgacaaaaaaagtcatttgtggtatgtctggtggcgtggattcttctgtgtcagcttttattcttcaacagcaaggctatcaggtggaaggcctgtttatgaaaaactgggaagaagatgatgatacggattattgtactgccgcagctgatcttgcagatgctcaggctgtatgtgataagttggggatcaaactacataaaattaattttgctgcagaatattgggataatgtctttgagcattttttaactgaatataaagcagggcgcacgccgaacccagatattttgtgtaataaagaaattaaatttaaagcatttttagaatatgcagctgaagatctcggtgcagattatattgcaacagggcattatgtacgtagagcgggagataatgaaaatgcaaaactattacgtggtttagatcccaataaagatcaaagttattttctttatactttaagccataaacaagtggggcaaagtttattccccgttggtgaaatcgagaagcccattgttcgtgctattgctgaagatcttggcttaattacggcgaagaaaaaagattctacagggatttgttttattggtgagcgtaaatttaaggatttcttagcacgctatttaccagctcaaccaggtaatattcgcactgtagatgatgaaattattggtcgccatgatggattaatgtatcacacattgggacaacgcaaaggattaggcattggtggtctaaaaaatgcgggagatgaagcttggtatgtagtagataaagatgtagaaaataatgaacttattgtcgcgcaaggtcacgatcatcctcgtttattttcaaaaggattgattgccagccaattacattgggttgatcgcgaaccaattcgagagtcattacgttgcacggtgaaaacgcgttatcgccaacaagatattccttgtgtgattgaaccaattgatgatgaaaccattcgagttatttttgatgaacctcaatcagcagtaaccccagggcaatctgccgtattttaccttggcgaagtttgtttgggtggcggtattatcgcagaaagaatataa

SEQ ID NO: 320 - protein, 383 aa, Haemophilus influenzae
MLISNTYNQHFPQLTQEQIASNATKKVICGMSGGVDSSVSAFILQQQGYQVEGLFMKNWEEDDDTDYCTAAADLADAQAVCDKLGIKLHKINFAAEYWDNVFEHFLTEYKAGRTPNPDILCNKEIKFKAFLEYAAEDLGADYIATGHYVRRAGDNENAKLLRGLDPNKDQSYFLYTLSHKQVGQSLFPVGEIEKPIVRAIAEDLGLITAKKKDSTGICFIGERKFKDFLARYLPAQPGNIRTVDDEIIGRHDGLMYHTLGQRKGLGIGGLKNAGDEAWYVVDKDVENNELIVAQGHDHPRLFSKGLIASQLHWVDREPIRESLRCTVKTRYRQQDIPCVIEPIDDETIRVIFDEPQSAVTPGQSAVFYLGEVCLGGGIIAERI

SEQ ID NO: 321 - DNA, 735 bp, Haemophilus influenzae
atgcaagcaattaaccccaattggaacgttccaaagaacattcatgcctttaccactactcgtgaagggggcgtgagcttagcgccttatttgagtttcaacttaggcgatcatgtcggtgatgataaaagtgcggtaaaaactaaccgcactttattagtcgaaaaatttggcttgccacaaaaacctatatttttaacgcaaacacacagcactcgagtacttcaattaccttattcagaacaaaatcttgaagcggatgcagtttatacaaatgttcccaatcaagtttgcgttgttatgacggcagactgtttgccagttctattcactacaacatctggcaatgaagtggctgcagcacatgctggctggcgtggtttatgcgatggcgtactagaagaaacagtgaaatattttcaagctaaacctgaagatattatcgcgtggtttggccctgcaataggtccaaaggcctttcaagttgggattgatgttgtagaaaagtttgttgcagtagatgaaaaagccaaactcgcctttcaacctgatgcaatcgaagacggtaaatacctgagtaatctttatcaaattgcaactcagcgattaaacaatctaggtattacgcaaatttatggtggaaatcactgtacattcaacgaaaaagaaaagttcttttcttatcgcagggacaatcaaacgggacgaatggcgagcgtcatttggtttgaataa

SEQ ID NO: 322 - protein, 244 aa, Haemophilus influenzae
MQAINPNWNVPKNIHAFTTTREGGVSLAPYLSFNLGDHVGDDKSAVKTNRTLLVEKFGLPQKPIFLTQTHSTRVLQLPYSEQNLEADAVYTNVPNQVCVVMTADCLPVLFTTTSGNEVAAAHAGWRGLCDGVLEETVKYFQAKPEDIIAWFGPAIGPKAFQVGIDVVEKFVAVDEKAKLAFQPDAIEDGKYLSNLYQIATQRLNNLGITQIYGGNHCTFNEKEKFFSYRRDNQTGRMASVIWFE

SEQ ID NO: 323 - DNA, 975 bp, Haemophilus influenzae
atgccacaaattaccctttcggctgaagtgcagccagaacaaatgggacaacgtttagaccaaacacttgcagagttgttccctgaatattctcgttcccgattaaaaacatggattgaagccgatctcgtaaaacttaacgaccgcattactaatattccgcgtgagaaagtgcttggaggagagagaatagagattattgttgaagtggaagatgaaacacgttttgaagcagaaaatattccattgaatatcgtgtatgaagatgatgatattattgtgattaacaaatcaaaagatcttgtggtacaccctggtgctggcaatccaaatggaaccgtgctcaatgcgttactctatcattatccgccgattgtagaagtaccgagagcaggaattgtgcatcgattagataaagatacgactggtctaatggttgttgctaaaaccattcctgctcaaactaagttagtacgtgatctacaaaaacgtaaaattacgcgcgaatatgaagcagtcgcttcaggcattatgactaaaggtggcacagtagatcaacctatggctcgtcatgcaaccaaacgtactttaatggcggttcatccaatgggaaaacccgctgttacccattatcgtattatggaaaattaccgtaattacacccgtttacgtttacgtttagaaacggggcgcacccatcaaatccgcgttcatatggcacatattgcccatccactgctaggcgatcaaacctatggcggacgccctcgtccacccaaaaatgcgagcgaagactttatggaagtattgcgtaatttcaaacgccaagctttacatgcggtcatgttacgcttagctcatccaattacaggggaaatgatggaatggtatgcaccattaccagatgactttgttgaattgcttaatgccctcaaagccgactatctcgaacatcaagatgagttagattattaa

SEQ ID NO: 324 - protein, 324 aa, Haemophilus influenzae
MPQITLSAEVQPEQMGQRLDQTLAELFPEYSRSRLKTWIEADLVKLNDRITNIPREKVLGGERIEIIVEVEDETRFEAENIPLNIVYEDDDIIVINKSKDLVVHPGAGNPNGTVLNALLYHYPPIVEVPRAGIVHRLDKDTTGLMVVAKTIPAQTKLVRDLQKRKITREYEAVASGIMTKGGTVDQPMARHATKRTLMAVHPMGKPAVTHYRIMENYRNYTRLRLRLETGRTHQIRVHMAHIAHPLLGDQTYGGRPRPPKNASEDFMEVLRNFKRQALHAVMLRLAHPITGEMMEWYAPLPDDFVELLNALKADYLEHQDELDY

SEQ ID NO: 325 - DNA, 789 bp, Haemophilus influenzae
atgcgtaaaataaaatctttggcattgcttgccgtggcagcattggttattggatgttcaagtggttcaaaagatgttgaacaagcatcggtaaatgaattatacacaaaaggtacaacatcattacaagaaggtagttactctgaagccattcgctatttaaaagcgacgactgagcgttttccaggtagcgtttatcaagaacaagcaatgttagatttaatttatgcaaattataaaactcaagattatacgcaagtattattgatggtagatagctttttacatcaatttccacaaagcccaaatcaagcctatgcggtatatatggctggcttaactaatgcagcaacaggcgataatttcattcaagatttttttggaattgaccgtgctacacgtgaaacaacctctatgcgtaccgctttttctaatttccaaaacttagttcgtgtatttcctaatagcccttactcacaagatgctttagctcgtatggcttatattaaagatgcactggctcgtcatgaattagagattgcaaaattctatgcaaaacgtaaagcgtgggtagcagttgcaaatcgtgtggtaggaatgttaaaacaatatcctgatactaaagcaacttatgaaggattatttctgatgcaggaagcttatgaaaaaatgggtttaaccgcattagcaaatgatactcaaaaaattattgatgcgaataaagataaaacttttgcaccaattgaaaaaccaaacgagccagacttaaaagtgccagcagtaaaatag

SEQ ID NO: 326 - protein, 262 aa, Haemophilus influenzae
MRKIKSLALLAVAALVIGCSSGSKDVEQASVNELYTKGTTSLQEGSYSEAIRYLKATTERFPGSVYQEQAMLDLIYANYKTQDYTQVLLMVDSFLHQFPQSPNQAYAVYMAGLTNAATGDNFIQDFFGIDRATRETTSMRTAFSNFQNLVRVFPNSPYSQDALARMAYIKDALARHELEIAKFYAKRKAWVAVANRVVGMLKQYPDTKATYEGLFLMQEAYEKMGLTALANDTQKIIDANKDKTFAPIEKPNEPDLKVPAVK

SEQ ID NO: 327 - DNA, 483 bp, Haemophilus influenzae
atgaaaaaaattattttaacattatcacttgggttacttaccgcttgttctgctcaaatccaaaaggctgaacaaaatgatgtgaagctggcaccgccgactgatgtacgaagcggatatatacgtttggtaaagaatgtgaattattacatcgatagtgaatcgatctgggtggataaccaagagccacaaattgtacattttgatgcagtggtgaatttagataagggattgtatgtttatcctgagcctaaacgttatgcacgttctgttcgtcagtataagattttgaattgtgcaaattatcatttaactcaaatacgaactgatttctatgatgaattttggggacagggtttgcgggcagcacctaaaaagcaaaagaaacatacgttaagtttaacacctgatacaacgctttataatgctgctcagattatttgtgcaaattatggtaaagcattttcagttgataaaaaataa

SEQ ID NO: 328 - protein, 160 aa, Haemophilus influenzae
MKKIILTLSLGLLTACSAQIQKAEQNDVKLAPPTDVRSGYIRLVKNVNYYIDSESIWVDNQEPQIVHFDAVVNLDKGLYVYPEPKRYARSVRQYKILNCANYHLTQIRTDFYDEFWGQGLRAAPKKQKKHTLSLTPDTTLYNAAQIICANYGKAFSVDKK

SEQ ID NO: 329 - DNA, 741 bp, Haemophilus influenzae
atgtcagttcttggacgaattcactcttttgaatcctgtggcactgtagatgggccgggtattcgttttattttatttatgcaaggctgcttgatgcgctgcaaatattgccacaatcgtgatacttgggatcttgaaggtggtaaagaaatcagtgtcgaagatttaatgaaagaagtcgtgacttatcgccattttatgaatgctactggcggtggtgttacggcatctggcggtgaggctgtgttacaagcagagtttgtgcgtgattggttccgtgcttgtaaagaggaagggattaatacttgcttagatacaaatggttttgtacgtcattatgatcatattattgatgaattattagatgtaaccgatcttgttttactcgatttaaaagaacttaatgatcaagttcatcaaaatcttattggggtgccaaataaacgtacccttgaatttgcaaaatatttgcaaaaacgtaatcaacatacttggattcgttatgttgtggttcctggttatactgatagcgatcacgatgtgcatttattaggtcagtttattgaaggtatgaccaatattgaaaaagttgaacttcttccttatcatcgattaggtgcacataaatggaaaacccttgggttagattatgagcttgaaaatgtattaccgccaactaaagaatccttagagcatattaaaacaattctagaaggttatggacacattgtaaaattctag

SEQ ID NO: 330 - protein, 246 aa, Haemophilus influenzae
MSVLGRIHSFESCGTVDGPGIRFILFMQGCLMRCKYCHNRDTWDLEGGKEISVEDLMKEVVTYRHFMNATGGGVTASGGEAVLQAEFVRDWFRACKEEGINTCLDTNGFVRHYDHIIDELLDVTDLVLLDLKELNDQVHQNLIGVPNKRTLEFAKYLQKRNQHTWIRYVVVPGYTDSDHDVHLLGQFIEGMTNIEKVELLPYHRLGAHKWKTLGLDYELENVLPPTKESLEHIKTILEGYGHIVKF

SEQ ID NO: 331 - DNA, 2313 bp, Haemophilus influenzae
atgtcagaacttaatgaaatgcaaaaattggcgtgggctggttttgctggtggcgattggcaagaaaatgtcaatgtacgtgactttatccaaaaaaactataccccttatgaaggcgatgactctttcttagcaggtccaaccgaagcaacaaccaagctttgggaatctgtaatggaaggaattaaaattgaaaaccgtactcacgcgccattagattttgatgaacatacaccatctaccattatctctcacgcacctggttacattaacaaagatttagaaaaaatcgttggtcttcaaactgatgaacctttaaaacgtgccattatgccattcggtggtatcaaaatggtggaaggttcttgtaaagtttatggtcgtgaacttgatccaaaagtgaaaaaaatcttcactgaataccgtaaaacacataaccaaggtgtattcgatgtttacacgccagatattttacgttgccgtaaatctggggtattaactggtcttccagatgcttatggtcgtggtcgtatcatcggtgactaccgtcgtgtagcactttatggtgtagatttcttaatgaaagataaatacgcacaattctcttctttacaaaaagatttagaagatggcgtaaatcttgaagcaacaattcgtttacgtgaagaaatcgcagaacaacactgtgcattaggtcaattaaaacaaatggcagcaagctatggttatgatatttctaacccagcaactaatgctcaagaagccattcaatggatgtactttgcttatcttgctgcaataaaatcacaaaatggtgcagcaatgtcattcggtcgtaccgcaacctttattgacgtgtacattgagcgtgatttaaaagcagggaaaattactgaaactgaagcgcaagaattagttgaccacttagttatgaaacttcgtatggttcgtttcttacgtacacctgaatacgatcaattattctctggtgacccaatgtgggcaactgaaaccatcgctggtatgggtttagatggtcgtacattagtaaccaaaaatacattccgtattttacacactctttacaacatgggtacttctccagaaccaaacttaaccattctttggtctgaacaattacctgaaaacttcaaacgtttctgtgcaaaagtatcgattgatacctcatcagttcaatacgaaaacgatgatttaatgcgtccagacttcaacaacgatgactacgcaatcgcatgttgtgtatcaccaatgattgtgggtaaacaaatgcaattcttcggtgcacgtgcaaacttagcgaaaacattgttatacgcaatcaacggcggtatcgatgaaaaattaggtatgcaagtaggtccgaaaactgcaccaattactgatgaagtattagattttgatacagtaatgactcgtatggatagtttcatggattggttggcaaaacaatatgtgactgccttaaacgtaatccactatatgcacgataaatattcatacgaagccgcattaatggcattacatgatcgtgatgtataccgtactatggcttgtggtatcgcaggtctttctgttgcggctgactcactttcagcaatcaaatatgcgaaagttaaaccagttcgtggcgacatcaaagataaagatggcaatgttgttgcaactaacgtagcaatcgactttgaaatcgaaggtgaatatccacaatatggtaacaatgataaccgtgttgatgacatcgcttgtgacttagttgaacgttttatgaagaaaattcaaaaacttaaaacttaccgcaatgcagtgcctacacaatctgtattaaccattacttctaatgtagtttatggtaagaaaacgggtaacacccctgatggtcgtcgtgctggtgcaccattcggaccaggtgcgaacccaatgcacggtcgtgaccaaaaaggtgcggtagcatcattaacttctgtagctaaacttccatttgcttacgcgaaagatggtatttcttataccttctcaatcgtaccaaatgccttaggtaaagatgcagaagcacaacgtcgcaaccttgctggcttaatggatggttacttccaccacgaagcaacggttgaaggtgggcaacacttaaatgtaaacgtgttaaaccgcgaaatgttgttagatgcaatggaaaatccggataaatatccacaattgactatccgtgtatcaggttacgcagtacgttttaactctttaactaaagagcaacaacaagacgtaattactagaactttcacagagtcaatgtaa

SEQ ID NO: 332 - protein, 770 aa, Haemophilus influenzae
MSELNEMQKLAWAGFAGGDWQENVNVRDFIQKNYTPYEGDDSFLAGPTEATTKLWESVMEGIKIENRTHAPLDFDEHTPSTIISHAPGYINKDLEKIVGLQTDEPLKRAIMPFGGIKMVEGSCKVYGRELDPKVKKIFTEYRKTHNQGVFDVYTPDILRCRKSGVLTGLPDAYGRGRIIGDYRRVALYGVDFLMKDKYAQFSSLQKDLEDGVNLEATIRLREEIAEQHCALGQLKQMAASYGYDISNPATNAQEAIQWMYFAYLAAIKSQNGAAMSFGRTATFIDVYIERDLKAGKITETEAQELVDHLVMKLRMVRFLRTPEYDQLFSGDPMWATETIAGMGLDGRTLVTKNTFRILHTLYNMGTSPEPNLTILWSEQLPENFKRFCAKVSIDTSSVQYENDDLMRPDFNNDDYAIACCVSPMIVGKQMQFFGARANLAKTLLYAINGGIDEKLGMQVGPKTAPITDEVLDFDTVMTRMDSFMDWLAKQYVTALNVIHYMHDKYSYEAALMALHDRDVYRTMACGIAGLSVAADSLSAIKYAKVKPVRGDIKDKDGNVVATNVAIDFEIEGEYPQYGNNDNRVDDIACDLVERFMKKIQKLKTYRNAVPTQSVLTITSNVVYGKKTGNTPDGRRAGAPFGPGANPMHGRDQKGAVASLTSVAKLPFAYAKDGISYTFSIVPNALGKDAEAQRRNLAGLMDGYFHHEATVEGGQHLNVNVLNREMLLDAMENPDKYPQLTIRVSGYAVRFNSLTKEQQQDVITRTFTESM

SEQ ID NO: 333 - DNA, 855 bp, Haemophilus influenzae
atggcatcagaaaatcaaaaactatcttctgttgcgctcacacctgttgaagcaacggattatgcagaaaatacagcaacttataaagcaaataaacgtccatttttatcgtttatgtccggtattagtgccggtgcttgtattgccttagcctttgtattttacacaacaacacaaactgctagtgcaggcgcaccttggggattaaccaagttagtgggtgggttagtattctcattaggtgtaattatggtggtaattctgggctctgaattattcacttcttctactttaactttagtcgcccgtgtaggcggtagaatcaccacgacacaaatgattcgaaattggatcgtggtgtatttaggcaacttcgttggtggtttatttattgcggctgttatttggtttagtggacaaacaatggcagcaaatggtcaatggggtttaacaattcttgcaaccgcccaacataaaattcatcacacttggtttgaagcttttaacctaggtattttatgtaacattatggtgtgtgtggcggtttggatgtcttattctggtaagactgttacagacaaagcatttattatgattatgccgattggtttgtttgttgcatcaggatttgaacactgtgtggctaatatgtttatgattccgatgggaattattaccgcacattttagtacacctgaattttggcaacaaatcggtgttgatccaatgaaatacgcagatttagatttgtaccatttcatcgtgaagaatttaatccctgtaacgttgggaaatattgtcggcggggcaatttgtattggtgtattccaacgttatttaaccaaaacgcattaa

SEQ ID NO: 334 - protein, 284 aa, Haemophilus influenzae
MASENQKLSSVALTPVEATDYAENTATYKANKRPFLSFMSGISAGACIALAFVFYTTTQTASAGAPWGLTKLVGGLVFSLGVIMVVILGSELFTSSTLTLVARVGGRITTTQMIRNWIVVYLGNFVGGLFIAAVIWFSGQTMAANGQWGLTILATAQHKIHHTWFEAFNLGILCNIMVCVAVWMSYSGKTVTDKAFIMIMPIGLFVASGFEHCVANMFMIPMGIITAHFSTPEFWQQIGVDPMKYADLDLYHFIVKNLIPVTLGNIVGGAICIGVFQRYLTKTH

SEQ ID NO: 335 - DNA, 93 bp, Haemophilus influenzae
ttggtgctattttactctcctcccctttcattgcaaagaaaagcaaaaattatttcaacaaactttgatattttgcaaggtttgtttaattaa

SEQ ID NO: 336 - protein, 30 aa, Haemophilus influenzae
MVLFYSPPLSLQRKAKIISTNFDILQGLFN

SEQ ID NO: 337 - DNA, 915 bp, Haemophilus influenzae
atgtattatggtttagatattggtggcacgaaaatagagcttgccgtattcaatgaaaaattagaaaaattatattctgaacgggtaccaacacctaaaaccgactatgaagaatggcttaacacgattgtggatttagtgaatcgtgctgatgaaaagtttggtgaggtgggcaccgtaggtttgggcgtacctggttttgttaatcaacaaactggattagccgaaattgccaatattcgtgtggcagataataaaccaattttatgcgatttgtccgcgcgtttgggccgtgaagtgcgggcagaaaatgacgcaaattgttttgcgttatctgaagcatgggatacggaaaatcagcaatattcgactgtacttggtttaattcttgggactggttttggtggtggctttgtcttaaacggtaaagttcattcaggtcaagtgggaatggcgggagagcttggtcatttacaattaaattatcatgctttgaaattattgggatgggataacgccccaatttatcaatgcggttgcggcaacaaggcttgtttggataattatctgtctggtcgcggttttgaaatgctttatcaagatttgaaaggcgaaacattatctgctcgtaaaattattgatttgttctatcaaagcaatgaaagtgcggtagattttgtgaatctttttgttgaattggcggcgatttctattggcaatatcattacggcatttgatcctcatatgattgtgttaggtggtggattatctaattttgattacctttatgaggctttaccaaaagcgcttccgcctcatttgatgcgaaaagcaaaagttccgccaattaaaaaagcgaaacacggcgattctggtggtgtgcgtggtgcggcagcgttgtttttaaccaaataa

SEQ ID NO: 338 - protein, 304 aa, Haemophilus influenzae
MYYGLDIGGTKIELAVFNEKLEKLYSERVPTPKTDYEEWLNTIVDLVNRADEKFGEVGTVGLGVPGFVNQQTGLAEIANIRVADNKPILCDLSARLGREVRAENDANCFALSEAWDTENQQYSTVLGLILGTGFGGGFVLNGKVHSGQVGMAGELGHLQLNYHALKLLGWDNAPIYQCGCGNKACLDNYLSGRGFEMLYQDLKGETLSARKIIDLFYQSNESAVDFVNLFVELAAISIGNIITAFDPHMIVLGGGLSNFDYLYEALPKALPPHLMRKAKVPPIKKAKHGDSGGVRGAAALFLTK

SEQ ID NO: 339 - DNA, 1440 bp, Haemophilus influenzae
atggaatttgaattttcaaaaatgttagaagaagtgctaacttggatagtcgcacaccttgatggacctttatgggatgccaccattattattttgcttgggactggtctattttttaccattacaacaggatttgtgcagttccgtttattccctgcaagccttcgtgaaatgtggtttggtcgtgcggtggagggtagttcattaacacctttccaagcgtttacgacaggtcttgcgagccgcgttggtgtgggtaacattggtggggttgcaacggcaatcgccttgggaggcgaaggcgcagtgttttggatgtgggtaacggcatttattggtatgtcgagtgctttcgctgaatctacccttgctcaattatttaaaattcaagataaagatggatcattccgtggtggccctgcttattatattgtgcaaggtttaaaatcacgttgtatggcagtggcttttgcacttgcattaatttttacatttggttttgcctttaattctgtgcaggcaaactctattgttgaagcaaccagcaatgcgtggaattggaaaggggaatatgtcggtatttcattagtaatttttaccgcacttattattttcggtggcgttaagcgtattgcgattatttcgagcaaccttgtaccaatgatggcacttttctatttgattatggcggtaattattcttggcatgcatattgatatgatcccttccgtgattcatcgtattgttcaaagtgcatttagttttgatgctgccgctggcggaatgtttggtgcattggtatcgaaagcaatgatgatggggattaaacgtggtttattctcaaacgaagcggggatgggatctgcgcctaattcggctgcagcagctcacgttaagcatccagttagccaaggtttagtgcaaatgctcggtgtgtttgttgatacaatgatcgtttgtacttgtactgcggtaattattctactttccaataattatggtagcgaaacgctcaaaagtatctcacttacgcaaaatgctttgcaataccacataggtgaatttggggtgcatttcttggcgtttatcttattgttattcgcttattcttctattattggtaactatgcttatgcggaaagcaatatccgttttataaaaaataaaccttggtttgtatttttgttccgtttaatggtgctatttttcgtgtatttcggtgcggttcgctctggcaatgtggtgtggaattttgcagatacggtaatggctgtcatggcaatcattaacttgatcgcaattttgatgttgtcgccaatcgtatggaaattaatgaaagattatcaacgccagcttaaagaaggaaaaacgccagagtttaaaattgatgaataccctgaattacgtaagaaaatatttgattcccgcatttggaaataa

SEQ ID NO: 340 - protein, 479 aa, Haemophilus influenzae
MEFEFSKMLEEVLTWIVAHLDGPLWDATIIILLGTGLFFTITTGFVQFRLFPASLREMWFGRAVEGSSLTPFQAFTTGLASRVGVGNIGGVATAIALGGEGAVFWMWVTAFIGMSSAFAESTLAQLFKIQDKDGSFRGGPAYYIVQGLKSRCMAVAFALALIFTFGFAFNSVQANSIVEATSNAWNWKGEYVGISLVIFTALIIFGGVKRIAIISSNLVPMMALFYLIMAVIILGMHIDMIPSVIHRIVQSAFSFDAAAGGMFGALVSKAMMMGIKRGLFSNEAGMGSAPNSAAAAHVKHPVSQGLVQMLGVFVDTMIVCTCTAVIILLSNNYGSETLKSISLTQNALQYHIGEFGVHFLAFILLLFAYSSIIGNYAYAESNIRFIKNKPWFVFLFRLMVLFFVYFGAVRSGNVVWNFADTVMAVMAIINLIAILMLSPIVWKLMKDYQRQLKEGKTPEFKIDEYPELRKKIFDSRIWK

SEQ ID NO: 341 - DNA, 828 bp, Haemophilus influenzae
atgaaactaattgaacaacatcaaatttttggcggttcacagcaagtttgggtgcataatgcccaaacacttcaatgtgaaatgaaatttgccgtctatttgccaaataatccggagaatcgaccgcttggcgtgatttattggctttctggcttaacttgtacagaacaaaatttcattaccaaatcaggcttccagcgttacgcggcagaacatcaagtgattgtggttgcccccgatacaagccctcgcggagagcaagtgccgaatgatgcggtttacgatttagggcagggagcgggcttttatcttaatgcgaccgagcagccttgggcgacgaattatcaaatgtatgattatatcttgaatgaattgcctgatttgattgaagcaaatttccctaccaacggcaaacgttccattatgggacattcaatgggcggacacggtgcattggtattggcactgcgaaatcgggaacgttatcaaagtgtttctgccttttcgcccattttgtcgccaagccttgtgccttggggagaaaaagccttttctgcctatttaggggaagatcgtgaaaaatggcagcaatatgatgccagcttgctcattcaacaaggctataaagtgcaaggtatacgcattgatcagggcttggaagatgagtttttaccgacacaattgcgtaccgaagattttatcgaaacctgtcgagtggcaagtcagccagtcgatgtgtgcttccataaaggctatgatcacagctattacttcatcgccagttttattggcgagcatattgcctatcatgcggcatttttgaagtaa

SEQ ID NO: 342 - protein, 275 aa, Haemophilus influenzae
MKLIEQHQIFGGSQQVWVHNAQTLQCEMKFAVYLPNNPENRPLGVIYWLSGLTCTEQNFITKSGFQRYAAEHQVIVVAPDTSPRGEQVPNDAVYDLGQGAGFYLNATEQPWATNYQMYDYILNELPDLIEANFPTNGKRSIMGHSMGGHGALVLALRNRERYQSVSAFSPILSPSLVPWGEKAFSAYLGEDREKWQQYDASLLIQQGYKVQGIRIDQGLEDEFLPTQLRTEDFIETCRVASQPVDVCFHKGYDHSYYFIASFIGEHIAYHAAFLK

SEQ ID NO: 343 - DNA, 1137 bp, Haemophilus influenzae
atggaaattaaacaaatcaattcaaccatcaaatctcgtgcggcggtagcattcgccccaaatcaacccttacaaattgtagaaatcgacgtagaaatgcctcgcaaaggcgaagtgttaattcgtaacactcacacgggcgtttgccatactgatgcgtttacgttatcaggaagcgatcctgaaggggtattccctgtggtgctaggacacgaaggtgcgggtgtggttgttgcggttggcgaaggtgtgttaagcgtaaaaccgggcgatcacgtcattcctctttatactgctgaatgtggcgaatgtgagttttgtcgctcgggtaaaaccaacttatgcgtctcagtgcgtgacactcaaggtaaaggcttaatgcctgattgcacgacacgtttttcttatcaaggtcagccgatctatcactatatgggctgttcaaccttcagtgaatactcagttgttgcagaagtttcactggcgaaaatcaacccagaagcgaaccacgaacaagtgtgtttgctcggctgcggtgtcaccacaggtattggtgcggtgcataatacggcaaaagtgcaagaaggcgactctgttgccgtgtttggcttgggtgcgattggtttagcggtagtgcaaggtgcgcgtcaagccaaagcaggtcgcattatcgccattgataccaatcctgcaaaatttgagttggcaaaacagtttggtgcaacggattgtttaaaccctaatgattacgataagccgatcaaagatgtgttgttagatattaataaatggggcattgaccatacctttgaatgtatcggtaatgtaaacgtaatgcgtcaagcattagaaagtgctcaccgtggctggggacaatccattatcatcggcgtagcgggtgcaggacaagaaatttcaacgcgtccgttccaattggtaacaggccgtgtttggaaaggttcggcatttggtggcgtgaaaggtcgctctgaacttccgcaaatggtggaagattcaatgaaaggcgacatccagttagaactgtttgtgactcacacaatgccacttgatcaaattaatgaagcctttgaattaatgcacgaaggtaaatcaatccgtactgttattcactactaa

SEQ ID NO: 344 - protein, 378 aa, Haemophilus influenzae
MEIKQINSTIKSRAAVAFAPNQPLQIVEIDVEMPRKGEVLIRNTHTGVCHTDAFTLSGSDPEGVFPVVLGHEGAGVVVAVGEGVLSVKPGDHVIPLYTAECGECEFCRSGKTNLCVSVRDTQGKGLMPDCTTRFSYQGQPIYHYMGCSTFSEYSVVAEVSLAKINPEANHEQVCLLGCGVTTGIGAVHNTAKVQEGDSVAVFGLGAIGLAVVQGARQAKAGRIIAIDTNPAKFELAKQFGATDCLNPNDYDKPIKDVLLDINKWGIDHTFECIGNVNVMRQALESAHRGWGQSIIIGVAGAGQEISTRPFQLVTGRVWKGSAFGGVKGRSELPQMVEDSMKGDIQLELFVTHTMPLDQINEAFELMHEGKSIRTVIHY

SEQ ID NO: 345 - DNA, 408 bp, Haemophilus influenzae
gtgacttacaccaccgctaaagctgctgaaaaaataggcatttccgcctacaccttacgcttttatgacaaagaaggcttgttacctaatgtcggacgtgatgaatacggtaatcgccgttttaccgacaaggatttgcaatggttaagtttattacaatgcttgaaaaatacaggaatgagcttaaaagacatcaaacgctttgcggaatgtaccatcattggcgatgataccattgaagaacgcctttccttatttgaaaatcaaacagaaaatgtaaagtgtcaaattgccgaattaaaacgttatttagatttgcttgaatacaaattagcgttttaccaaaaagcgaaagcactaggctcggtaaaagccgtaaatttaccgcaaattcctgaaacgagctaa

SEQ ID NO: 346 - protein, 135 aa, Haemophilus influenzae
MTYTTAKAAEKIGISAYTLRFYDKEGLLPNVGRDEYGNRRFTDKDLQWLSLLQCLKNTGMSLKDIKRFAECTIIGDDTIEERLSLFENQTENVKCQIAELKRYLDLLEYKLAFYQKAKALGSVKAVNLPQIPETS

SEQ ID NO: 347 - DNA, 288 bp, Haemophilus influenzae
atggctaaaaagagtatattccgagccaaattttttcttttttacagaacggagtttattatgtttggtttatcccccgctcaactgattattttattagtcgttattttattgatttttggcacgaaaaaattaagaaatgctggctcagatcttggtgcagcagtgaaaggtttcaaaaaggcgatgaaagaagatgaaaaagtaaaagatgcggaatttaagtctatagataatgaaacagcgtctgcaaaaaaagaaaatataaaagagaaagaacaggcttaa

SEQ ID NO: 348 - protein, 95 aa, Haemophilus influenzae
MAKKSIFRAKFFLFYRTEFIMFGLSPAQLIILLVVILLIFGTKKLRNAGSDLGAAVKGFKKAMKEDEKVKDAEFKSIDNETASAKKENIKEKEQA

SEQ ID NO: 349 - DNA, 549 bp, Haemophilus influenzae
gtgtttgatattggtttttcagaacttattttactaatggttttgggattggttgtattaggcccgaaacgtttgcctatagcaattcgcactgtaatggattgggtaaaaacaattcgtggtttagctgctaacgttcaaaatgagttgaaacaagagctaaaattgcaagaattacaagatagtattaaaaaagcggaatcccttaacttgcaagccctttcaccagaattgagtaaaacggtggaagaattaaaagctcaagcagataagatgaaagcagagctagaagataaagcagctcaagctggtacaacggtggaagagcaaatcaaagaaatcaaaagtgcggctgaaaatgcagaaaagtctcaaaatgcaatctcagttgaggaggctgcagaagcagaaaaaacacctaccgatttgaccgcacttgaaactcacgagaaagtagaactgaacacacatttatctagctattatcctcctgatgatattgaaatcgctccagcgtcaaaatctcaatcttcaaaaactaaatcatag

SEQ ID NO: 350 - protein, 182 aa, Haemophilus influenzae
MFDIGFSELILLMVLGLVVLGPKRLPIAIRTVMDWVKTIRGLAANVQNELKQELKLQELQDSIKKAESLNLQALSPELSKTVEELKAQADKMKAELEDKAAQAGTTVEEQIKEIKSAAENAEKSQNAISVEEAAEAEKTPTDLTALETHEKVELNTHLSSYYPPDDIEIAPASKSQSSKTKS

SEQ ID NO: 351 - DNA, 771 bp, Haemophilus influenzae
atgagtaatgtggatgaatctcaacctttaattacgcaccttgttgaactaagaaaccgtttattacgctgtgtgatttgtgtagtgttggtttttgttgctttggtgtatttttccaatgatatttatcattttgttgctgcacctttaacggctgttatgccaaaaggcgcaacaatgattgcaaccaatattcaaacgcctttctttacgccaattaaattaactgcgattgttgcaatttttatttctgtcccttatttgctttatcaaatttgggcttttattgcacctgctttatatcagcacgaaaaacggatgatttatccgttgttattttccagtacgattttattttattgcggtgttgcttttgcttactatgtcgtctttcctcttgtattcaccttctttacacaaacagccccagaaggcgttaccatcgcaacagatattagtagttatttagattttgctttagcgttatttttagcttttggcgtttgttttgaagtgccaattgcgattattctactttgctggactggtattaccactgtaaaggctctttccgaaaaacgcccttatattattgttgcggcattttttattggaatgcttttaacgcctcctgatgttttttcacaaactttgcttgccataccgatgtgcttgctgtttgagctcggtctattggtcgctcgattttatcaaccaaaagacgacgaaagtgcggttaaaaataatgatgaatcagaaaaaacacaatga

SEQ ID NO: 352 - protein, 256 aa, Haemophilus influenzae
MSNVDESQPLITHLVELRNRLLRCVICVVLVFVALVYFSNDIYHFVAAPLTAVMPKGATMIATNIQTPFFTPIKLTAIVAIFISVPYLLYQIWAFIAPALYQHEKRMIYPLLFSSTILFYCGVAFAYYVVFPLVFTFFTQTAPEGVTIATDISSYLDFALALFLAFGVCFEVPIAIILLCWTGITTVKALSEKRPYIIVAAFFIGMLLTPPDVFSQTLLAIPMCLLFELGLLVARFYQPKDDESAVKNNDESEKTQ

SEQ ID NO: 353 - DNA, 1350 bp, Haemophilus influenzae
atgtcaaaagttgcttccttagatgcatttttaacaaaagttgctcaacgcgatggttatcaacctgaatttttacaagcggttcgcgaggtattcacatcaatttggccttttttagaagccaatcctaaatatcgttcagaagcattattagaacgtttagttgagcctgaacgagcatttcaattccgtgtggcgtggactgacgataaagggcaagtgcaagtaaacagagcatttcgtgtacaatttaatagtgccataggcccatttaaaggggggatgcgtttccatccatcagtaaatttatctatcttaaaattcttaggttttgagcaaatctttaaaaatgctttaacaacattgcctatgggcggggcaaaaggcggttcagattttgatcctaaaggcaaatctgatgctgaagttatgcgtttttgccaagcattaatggctgaactttatcgtcacgtaggagctgatacagatgttcccgcaggcgatataggtgttggtgggcgcgaagttggctatttagctggctatatgaaaaaattatcaaaccaatcagcctgtgttttcactggtcgcggtctttctttcggtggtagtttaattcgtccggaagcaacgggatatggattagtttattttgctcaagcaatgcttgctgaaaaaggcgatagttttgcaggtaaagtagtttcagtttctggttctggtaatgtagcacaatacgctattgaaaaagcattatctcttggtgcaaaagtagtaacttgttctgattcatcaggttatgtttatgatccaaatggatttactactgaaaaattagccgcacttttcgatattaaaaatacaaaacgtgggcgtgtgaaagattatgcagaacagtttggtttgcaatattttgaaggtaaacgcccttgggaagtgcaagttgatattgcgcttccttgtgcaactcaaaatgaattagaactttctgatgcacaacgtttaattaaaaatggtgtgaaattagtggctgaaggtgcgaatatgccaacaacaattgaagcaacagaagcattactagctgcagatgtattatttggtccgggtaaagctgccaacgctggtggtgttgctacttctggtttagaaatggcacaaagttcacaacgtttatattggacagcggaagaagtggacgctcaattacatcgcattatgttagatattcacgcaaactgtaaaaaatacggcacaattgaaggtcaagaaaacattaactatgttgttggggcaaatgtagcaggctttgttaaggtggctgatgcaatgttagcccaaggcgtttattaa

SEQ ID NO: 354 - protein, 449 aa, Haemophilus influenzae
MSKVASLDAFLTKVAQRDGYQPEFLQAVREVFTSIWPFLEANPKYRSEALLERLVEPERAFQFRVAWTDDKGQVQVNRAFRVQFNSAIGPFKGGMRFHPSVNLSILKFLGFEQIFKNALTTLPMGGAKGGSDFDPKGKSDAEVMRFCQALMAELYRHVGADTDVPAGDIGVGGREVGYLAGYMKKLSNQSACVFTGRGLSFGGSLIRPEATGYGLVYFAQAMLAEKGDSFAGKVVSVSGSGNVAQYAIEKALSLGAKVVTCSDSSGYVYDPNGFTTEKLAALFDIKNTKRGRVKDYAEQFGLQYFEGKRPWEVQVDIALPCATQNELELSDAQRLIKNGVKLVAEGANMPTTIEATEALLAADVLFGPGKAANAGGVATSGLEMAQSSQRLYWTAEEVDAQLHRIMLDIHANCKKYGTIEGQENINYVVGANVAGFVKVADAMLAQGVY

SEQ ID NO: 355 - DNA, 441 bp, Haemophilus influenzae
atgtctgaagaaaatattaaattactcaaaaaagtgggattaaaaattacagagcctcgcttaactattctcgctttaatgcaaaatcataaaaatgaacatttttctgcagaagatgtttataaaattttgctggaacaaggtagtgaaattggattagccacagtttatcgtgtgcttaatcaatttgatgaagcacacattgtaatccgtcataattttgagggaaataaatccgtttttgagcttgctccaacagaacatcacgatcatattatttgtgaagattgcggtaaagtatttgaatttacggataatattattgaacaacgtcagcgtgaaatcagtgaaaaatacggcataaaattaaaaacgcataacgtgtatctttacggtaaatgcagtgatattaatcattgtgacgaaaacaattcaaaataa

SEQ ID NO: 356 - protein, 146 aa, Haemophilus influenzae
MSEENIKLLKKVGLKITEPRLTILALMQNHKNEHFSAEDVYKILLEQGSEIGLATVYRVLNQFDEAHIVIRHNFEGNKSVFELAPTEHHDHIICEDCGKVFEFTDNIIEQRQREISEKYGIKLKTHNVYLYGKCSDINHCDENNSK

SEQ ID NO: 357 - DNA, 525 bp, Haemophilus influenzae
atggcaatagttggtcttttttatggtagtgatactggaaatactgaaaacatcgcaaaacaaatccaaaaacaattaggtagtgatttaattgatattcgtgatattgccaaaagtagcaaagaagatattgaagcatacgatttcttgcttttcggtatcccaacttggtattacggcgaagcacaagcagactgggatgactttttcccaacactcgaagaaattgattttacagataaacttgtaggtattttcggttgtggcgatcaagaagattatgcagattatttctgtgatgctatcggaactgtgcgcgatattatagagccacacggtgcaattgtggtaggaaattggccaacagaaggctataattttgaagcttcgaaagccttattggaagatggcactttcatcggattatgtattgatgaagatcgccaaccagagcttaccgcagagcgtgtagaaaaatggtgtaaacaaatttatgatgaaatgtgcttagctgaattggcttag

SEQ ID NO: 358 - protein, 174 aa, Haemophilus influenzae
MAIVGLFYGSDTGNTENIAKQIQKQLGSDLIDIRDIAKSSKEDIEAYDFLLFGIPTWYYGEAQADWDDFFPTLEEIDFTDKLVGIFGCGDQEDYADYFCDAIGTVRDIIEPHGAIVVGNWPTEGYNFEASKALLEDGTFIGLCIDEDRQPELTAERVEKWCKQIYDEMCLAELA

SEQ ID NO: 359 - DNA, 864 bp, Haemophilus influenzae
atgatcttcatttttatctctctgtttgctaaaatttttttcaattataacgacttctttacaaattctcacgtaaaaattatggcaaaatcattactcaattatcaatttcatcaagtaaaacaaacgattaatacacctgttttaatttttattcacggtttattcggagatatggataatctcggcgttattgcgagagcttttagtgaacattacagtattttacgtattgatttacgcaatcacggccatagttttcattcggaaaaaatgaattatcaactaatggctgaagatgttatcgcagtaatccgccacttaaatttatccaaagtgatattaattggtcattctatggggggaaaaaccgccatgaaaatcaccgcactttgcccagaattagtcgaaaaattaatcgtaattgatatgtcccccatgccttatgagggatttggtcataaagatgtttttaatggcctatttgcggtaaaaaatgcaaagcctgaaaatcgtcagcaagccaaaccgattttaaaacaagaaattaatgatgaagacgttgtacaatttatgttgaaatcttttgatgttaattcagctgattgttttcgttttaatcttaccgcactttttaacaattatgccaatattatggattgggaaaaagtacgtgtatttacgccaactctttttattaagggtggaaattcctcttatataaaaatagaaaatagcgaaaaaattctagaacaatttcctaatgcaactgcctttacgattaatggcagtggacactgggttcacgccgaaaaacctgattttgttattcgtgcaattaaacgatttctaaataagaattaa

SEQ ID NO: 360 - protein, 287 aa, Haemophilus influenzae
MIFIFISLFAKIFFNYNDFFTNSHVKIMAKSLLNYQFHQVKQTINTPVLIFIHGLFGDMDNLGVIARAFSEHYSILRIDLRNHGHSFHSEKMNYQLMAEDVIAVIRHLNLSKVILIGHSMGGKTAMKITALCPELVEKLIVIDMSPMPYEGFGHKDVFNGLFAVKNAKPENRQQAKPILKQEINDEDVVQFMLKSFDVNSADCFRFNLTALFNNYANIMDWEKVRVFTPTLFIKGGNSSYIKIENSEKILEQFPNATAFTINGSGHWVHAEKPDFVIRAIKRFLNKN

SEQ ID NO: 361 - DNA, 594 bp, Haemophilus influenzae
atgaagatcattgaagtagatgaagaattataccaatatattgcgagccaaacccgctctattggagaaagtgcttcggatattttacgccgtttgcttagtttacctgtgcatacttcaattgttaatgatttaattattacttcagcagaaacagatcaaaagccaaaacaggctatcaatgtgaaagaagtaaatatcaaaacaacaaaaaagcaatcaataaccgcaattaatcagattgtagaaaaagtccaaactttattaaattcaactgaatttcaagaagaaagtaaggctgttgtacgtttcttagcgattttacgtgtgctttatcgtacaaatcctgaaagttttgcacaagcaacggaatctttacaaggacgtactcgagtttactttgcacgcgatgaagcgacattattaatggcgggtaaccatactaaaccaaaacaaattccagatacgccttattgggttattaccaatacaaatagtggacgaaaaatgttaatgctagaaggtgcaatgcaatctatggaattacctgaaacattgattgatgaagtgcgatcatatttcacggtaaattaa

SEQ ID NO: 362 - protein, 197 aa, Haemophilus influenzae
MKIIEVDEELYQYIASQTRSIGESASDILRRLLSLPVHTSIVNDLIITSAETDQKPKQAINVKEVNIKTTKKQSITAINQIVEKVQTLLNSTEFQEESKAVVRFLAILRVLYRTNPESFAQATESLQGRTRVYFARDEATLLMAGNHTKPKQIPDTPYWVITNTNSGRKMLMLEGAMQSMELPETLIDEVRSYFTVN

SEQ ID NO: 363 - DNA, 1359 bp, Haemophilus influenzae
atgtatccttggcaagattttgctattcaacctgatttctcagataaaatcgctttgcatactacgcagggcgatgtgcttacttggatagaattgactacaaagattaaccaaacagtggcttttttacaaaaaaaaggcgtaaatgcggaaagtgcggttgcttttgtgggaaaaaattcagagaaaattttatttttatatctggcgacaattcagcttggtgcaaaagttttaggcataaaccctgcctttccacaagaaaaaattgcaaaattatgtgagttttatcaaatcgatttttgtttttatgataaagatttactgaatttgcaagaaattggtgtttttacacaaaaagccgatttttttcgtcctgcgacgatgacgctcacgtctggctcgacaggtttaccaaaagcagttgtgcataatgtccaagcgcatttggataatgcaaaaggggtatgtaacttaatgaagtttgattgtaatcaatcttggttactttcattacccttatatcacgtttcagggcaaggtattgtttggcgttggttatattgcggtgcacaattacatttcccagaagatgatttttatgcttcattattaaagacgactcacgtttctcttgtgccaacgcaattacagcgtttattagattatttacaggaaaatccgagcatttcatttgctacacgccatattttactgggcggtgcgcatattccgacagaacttacacaaaaaatggtgaaatatggcattaaaacttattctggttatggaatgacggaaatggcgtctacggtttttgccaaacaatctgataaaaaacaaggcgtagggcaaccgctcttaggtagagagtattgtttagtaaatgatgaaatttggctgaaaggtgcaggtttggcgatgggttattggaaagatcgacaaattgttccattaacgaataaccaaggctggattcagacaaaagataaaggcatttggcaagagggcgaacttgttattatcggacgacttgatgatatgtttatttcaggtggcgaaaatattcagccagaagaaattgaacaagtgattattcaacattcttcagttaatcaagtgtttgttttaccacaaaaaaacaaagaatttggtcagcgtcctgtcgctttagtggattttaatgagccctttagcaaaagtgcggttgaaaatttaatgttttttttacaagataaacttgcacgttttaaacaacctattgcatattatcctttgccactgatgcttgagaaaggcattaagatctcacgtaaacagcttgctgattggctggcaaagcgagatgagataaattaa

SEQ ID NO: 364 - protein, 452 aa, Haemophilus influenzae
MYPWQDFAIQPDFSDKIALHTTQGDVLTWIELTTKINQTVAFLQKKGVNAESAVAFVGKNSEKILFLYLATIQLGAKVLGINPAFPQEKIAKLCEFYQIDFCFYDKDLLNLQEIGVFTQKADFFRPATMTLTSGSTGLPKAVVHNVQAHLDNAKGVCNLMKFDCNQSWLLSLPLYHVSGQGIVWRWLYCGAQLHFPEDDFYASLLKTTHVSLVPTQLQRLLDYLQENPSISFATRHILLGGAHIPTELTQKMVKYGIKTYSGYGMTEMASTVFAKQSDKKQGVGQPLLGREYCLVNDEIWLKGAGLAMGYWKDRQIVPLTNNQGWIQTKDKGIWQEGELVIIGRLDDMFISGGENIQPEEIEQVIIQHSSVNQVFVLPQKNKEFGQRPVALVDFNEPFSKSAVENLMFFLQDKLARFKQPIAYYPLPLMLEKGIKISRKQLADWLAKRDEIN

SEQ ID NO: 365 - DNA, 3336 bp, Haemophilus influenzae
atgattaggaaacttatgaaaatacctccattttttaccgcactttttgcctcggcaatgtttacccttagcgtttcgcaaggggtattggcggcaaattcaacaaacgtattaccaacggagcaatcgcttaaagccgatttggctaacgctcaaaaaatgagtgagggggaggcaaaaaataggttgttagcagaattacaaacatcaattgatttattgcagcaaattcaagctcaacaaaaaatcaatgatgcattgcaaacaacattaagccattcagagagtgaaattagaaagaataatgcagaaattcaagcattaaaaaaacaacaagaaacggcaacaagtactgatgataatgcacaatcacaggactatttacaaaatagtctcactaagttaaatgatcaattacaagatacgcaaaacgcattaagcacagcaaatgcacaattggcagggcaaagttctatttctgaacgagcacaagcggcattaacagaaaatgttgtacgcacacagcaaatcaatcaacaattagccaataatgatattggtagcatattgcgaaaacaatatcagattgaattacaactgattgatttaaagaatagttataatcaaaacttattaaaaaataatgatcagctttctttactctatcaaagccgttatgacctattgaatttacgtttacaagtacagcagcaaaatattattgcgattcaagaagtcattaatcaaaaaaatcttcagcaatcacaaaatcaagtagaacaagctcagcaacagcaaaaaactgtgcaaaatgattacattcaaaaagaacttgatcgcaatgcacagcttggtcagtatttattaaaacaaacagaaaaagcgaattcattaactcaagatgagttaagaatgcggaatattttagatagcctcactcaaactcaacgtactattgatgaacaaattagtgcattacaaggcacgttagttctttcacgtattatccagcaacaaaaacaaaaattaccgactaacttaaatattcaaggtttatcaaaacaaattgccgatttgcgtgtacatatttttgacattactcaaaaacgcaatgaactttatgatctagataactatattaataaagttgaaagtgaagatggaaaacaatttactgaggcagaaagaacgcaagttaaaacgctattaactgagcgtcggaaaatgacatctgatctgattaaatctttaaataatcaattaaatctcgcgatttctttggaattaacacagctgcaaattacacaaatcagtgatcaaattcaatctaaattagagcagcaaagtttttgggtgaaaagtaataatcctattaatttagattgggtaaaaatgctgccaagagctttaattgaacagtttaatggtatgttgaaaaaattaggttttccaactaattatgacaatttaccttatttgctgatgtatttcttagggttatttattgtaggcggtgcaatttttaaatttaaaaatcgtattaaacaacaattaaacaaaattaatcgtgaaatacatcgtttagatacagatagtcagtggagtactccacttgccctgttattaacagcgtttttaacgctttctagtacactttggtttttagcagtttgccaaatgatcggcttctttttcttcaaaaatccagaagaattttggcattggtcatttagtatggcgggttattggtggttctttacattttggatttcattgttccgtccaaatggtatttttgttaatcattttgaatcttcaaaagagaatgcacaacgttttcgtggtgttatccagcgcattattattgtggttgtattgcttttaaatacttctgtgtttagcaatgtcactgatgcaggtttagctaatgatgtgttaggtcaaattaatactattgcggctctaattttctgtgcggcgattattgcccctcgttttaatcgagtacttcgttcttatgaacctgaaacaaataaacatcattggttaataagaattgtacaaattggtttgagattaattcctgtgggattaatcgtacttattgttttaggttattactacaccgctttaaatttaattgagcattttattcattcttatattgcttggtgtgtatggtggttagtacgcaatacgatttaccgtggtattacggtttcttctcgtcgtttagcacatcgccgtttagcagaaaaacgtcgtcaaaaagcacttgaaaataattatgaaaatatatcctctgatgatgtggttgcagtgggagagccagaggaaagtttggcgttaaatgatgtgcgtagccaattattacgttttgtagatctctttatttggacagcattattagggattttctactatgtatggtcagatttagtcaccgtagtgagctatttacgtgaaattacactttggcaacaaaccacgacaaccgatgctggcactgtaatggaaagcattactttatttaatcttcttattgctttggttatcgtaggaattacttatgtgttggttcgtaatatttcaggcattttggaagtattaattttctctcgcgtgaatctttcacaaggtacgccttatactattacgacattgctcacttatatttttatcgccattggtggtgcgtgggcatttgcaaccttagggatgtcttggtcaaaattacaatggttatttgccgcactttctgttggtcttggttttggtatgcaagagatttttgcaaactttgtgtcaggtatcattttgttatttgaacgcccaatccgagttggcgatgtggttaccattaatgaagtgagcggtactgtagcgaaaattcgtatccgtgcaattacattgattgattttgatcgcaaagaagtgattgtgccaaataaatcttttgtgacaggtcaagtgaccaactgggcattatctaacactatgacacgtttagtgattagcgttggtgttgcttatggttctgatttaacactcgtgcgccaattattacttcaagcagctgatgaacagccgactattttacgcgatcctaaaccatctgcttattttttaacttttggtgcaagtacactggatcacgagttacgtgtttatgtagaacaagttggggatcgcaccagtactacagatgcccttaatcgccgtattaatgaattatttgcagaacataatattgatattgcctttaatcaattagatgtatttatcaaaaataatgatacaggcgaagaaattccttttgttgatgtaaaaaaataa

SEQ ID NO: 366 - protein, 1111 aa, Haemophilus influenzae
MIRKLMKIPPFFTALFASAMFTLSVSQGVLAANSTNVLPTEQSLKADLANAQKMSEGEAKNRLLAELQTSIDLLQQIQAQQKINDALQTTLSHSESEIRKNNAEIQALKKQQETATSTDDNAQSQDYLQNSLTKLNDQLQDTQNALSTANAQLAGQSSISERAQAALTENVVRTQQINQQLANNDIGSILRKQYQIELQLIDLKNSYNQNLLKNNDQLSLLYQSRYDLLNLRLQVQQQNIIAIQEVINQKNLQQSQNQVEQAQQQQKTVQNDYIQKELDRNAQLGQYLLKQTEKANSLTQDELRMRNILDSLTQTQRTIDEQISALQGTLVLSRIIQQQKQKLPTNLNIQGLSKQIADLRVHIFDITQKRNELYDLDNYINKVESEDGKQFTEAERTQVKTLLTERRKMTSDLIKSLNNQLNLAISLELTQLQITQISDQIQSKLEQQSFWVKSNNPINLDWVKMLPRALIEQFNGMLKKLGFPTNYDNLPYLLMYFLGLFIVGGAIFKFKNRIKQQLNKINREIHRLDTDSQWSTPLALLLTAFLTLSSTLWFLAVCQMIGFFFFKNPEEFWHWSFSMAGYWWFFTFWISLFRPNGIFVNHFESSKENAQRFRGVIQRIIIVVVLLLNTSVFSNVTDAGLANDVLGQINTIAALIFCAAIIAPRFNRVLRSYEPETNKHHWLIRIVQIGLRLIPVGLIVLIVLGYYYTALNLIEHFIHSYIAWCVWWLVRNTIYRGITVSSRRLAHRRLAEKRRQKALENNYENISSDDVVAVGEPEESLALNDVRSQLLRFVDLFIWTALLGIFYYVWSDLVTVVSYLREITLWQQTTTTDAGTVMESITLFNLLIALVIVGITYVLVRNISGILEVLIFSRVNLSQGTPYTITTLLTYIFIAIGGAWAFATLGMSWSKLQWLFAALSVGLGFGMQEIFANFVSGIILLFERPIRVGDVVTINEVSGTVAKIRIRAITLIDFDRKEVIVPNKSFVTGQVTNWALSNTMTRLVISVGVAYGSDLTLVRQLLLQAADEQPTILRDPKPSAYFLTFGASTLDHELRVYVEQVGDRTSTTDALNRRINELFAEHNIDIAFNQLDVFIKNNDTGEEIPFVDVKK

SEQ ID NO: 367 - DNA, 1074 bp, Haemophilus influenzae
atggctggtaatacaattggacaacttttccgtgtgacaacctttggggagtcacatggtattgcattaggctgtatcgttgatggcgtgccaccaaatctcgaattatccgagaaagatattcagccagatctagatcgccgtaaaccaggaacatctcgatatactacgcctcgtcgtgaagatgacgaagttcaaattttatctggtgtgtttgaaggaaaaaccacaggcacaagtattgggatgatcattaaaaatggtgatcagcgttcgcaagattatggtgacattaaagatcgtttccgccctggtcatgctgattttacctatcagcaaaagtatggaatccgtgattatcgtggcggtgggcgttcgtcagcgcgtgaaacagcgatgcgggttgcagcgggagcgattgcgaaaaaatatttacgcaaacattttggcattgaggtgcgaggttttttaagccaaatcggtaatataaaaattgctccgcagaaagtgggacaaattgattgggaaaaggtaaacagcaatccattcttttgtcctgatgaaagtgcgatagaaaaattcgatgaattgatccgtgaacttaaaaaagaaggagattctattggtgcaaaacttactgttattgcagaaaatgtacctgtaggattgggcgagccagtatttgaccgtttagatgccgatcttgctcacgcattaatgggaattaatgcagtaaaaggtgtagaaattggcgatggctttgctgtggttaaacaacgaggttcggaacatcgtgatgaaatgacacctaatggctttgaaagtaatcatgcaggcggtattttaggcggaattagttcaggacaaccaattatcgccactattgcactaaaaccaacttcaagcattacgattcctggtcgttcaatcaatcttaatggtgaagccgtagaagttgtaacaaaaggtcgtcacgatccttgtgtggggattcgtgctgtgccaattgcggaagctatggtggcgattgtcttattagatcatctcttacgttttaaggctcagtgtaaataa

SEQ ID NO: 368 - protein, 357 aa, Haemophilus influenzae
MAGNTIGQLFRVTTFGESHGIALGCIVDGVPPNLELSEKDIQPDLDRRKPGTSRYTTPRREDDEVQILSGVFEGKTTGTSIGMIIKNGDQRSQDYGDIKDRFRPGHADFTYQQKYGIRDYRGGGRSSARETAMRVAAGAIAKKYLRKHFGIEVRGFLSQIGNIKIAPQKVGQIDWEKVNSNPFFCPDESAIEKFDELIRELKKEGDSIGAKLTVIAENVPVGLGEPVFDRLDADLAHALMGINAVKGVEIGDGFAVVKQRGSEHRDEMTPNGFESNHAGGILGGISSGQPIIATIALKPTSSITIPGRSINLNGEAVEVVTKGRHDPCVGIRAVPIAEAMVAIVLLDHLLRFKAQCK

SEQ ID NO: 369 - DNA, 861 bp, Haemophilus influenzae
atgaataaaattttattaaaaacaaccataatttttaccgcacttttctctctgaacgttgttgcgtctcctctagattggaaaaaagtgaaacgccctattccaagtgaagatggtaaagcaagtcctattggtagttataccaacgggtgtattattggagcgcaagcattaccgccgaaaggtgaaggttaccaagttattcgtatgaatcgcaatcgttattatggtcatccaaatatgattcagtatattgaacgtttggggcagcgagctaaagctgctgggttaccaactatgttagtgggtgatattgccatgccgggtggcgggcggtttttaacgggtcatgctagccatcagatgggattagatgcggatatttggttaagaatgggcgaaatgtcagacgccgatgcgctgaattctgatggtaaaggtttattagttgtagatagaaaggcgcaacgagtggatgaacgagtatggaatagcaatcatgcgacgttaatcaagttagccgcacaagatccaaatgtgacgcgtatttttgttaatcctgcgattaaggtaaaattatgtcaaaccgctggcaatgatcgcggttggctacacaaagttcgtccttggtatggacacaactctcattttcatgttcgtttaacttgccccgcagatgcatcttattgtgaaaatcaagcgcctgtgcctgctggtgatggttgtggagacgaattatattcttggtttgaaccgccaaaaccaggtgcttcagtgagcaaacctaaagttacaccgcctgagccgtttttgtgccaacaaattttaaattccccgaatcggagtgaatggttagaatag

SEQ ID NO: 370 - protein, 286 aa, Haemophilus influenzae
MNKILLKTTIIFTALFSLNVVASPLDWKKVKRPIPSEDGKASPIGSYTNGCIIGAQALPPKGEGYQVIRMNRNRYYGHPNMIQYIERLGQRAKAAGLPTMLVGDIAMPGGGRFLTGHASHQMGLDADIWLRMGEMSDADALNSDGKGLLVVDRKAQRVDERVWNSNHATLIKLAAQDPNVTRIFVNPAIKVKLCQTAGNDRGWLHKVRPWYGHNSHFHVRLTCPADASYCENQAPVPAGDGCGDELYSWFEPPKPGASVSKPKVTPPEPFLCQQILNSPNRSEWLE

SEQ ID NO: 371 - DNA, 768 bp, Haemophilus influenzae
atggatatcggcattgatcttttagcaatattgttttgtgttggttttgtcgcatcatttatcgatgcaattgctggcggtggtggattaattactattccagcgttgcttatgactggcatgccaccagcaatggcgttaggcaccaacaaattgcaagctatgggcggtgcattatccgcaagcctttatttcttgcgaaaaagagcggtcaatttacgcgatatttggtttattttgatttgggttttcttaggttcagccctaggtacattattaattcaatcaattgacgtggcgattttcaaaaaaatgctgccttttttgattttagctattggtctatattttttatttacccctaaattaggtgatgaagatcgaaaacagcgtttaagttacatgttatttggtcttttagttagcccatttttaggtttttatgatggcttctttggaccagggactggctcaatcatgagtttagcctgtgttactttgctaggatttaatctcccgaaagcgacggcacatgcaaaagtgatgaacttcacttcgaaccttgcttcttttgcgcttttcttattgggtggacaaattctttggaaagtgggtttcgtgatgatggctgggagcattttaggtgcaaatttaggtgccaaaatggtgatgacgaaaggtaaaaccttgattcgaccgatggttgttatcatgtcttttatgatgacggctaaaatgatttacgatcagggttggtttcatttttaa

SEQ ID NO: 372 - protein, 255 aa, Haemophilus influenzae
MDIGIDLLAILFCVGFVASFIDAIAGGGGLITIPALLMTGMPPAMALGTNKLQAMGGALSASLYFLRKRAVNLRDIWFILIWVFLGSALGTLLIQSIDVAIFKKMLPFLILAIGLYFLFTPKLGDEDRKQRLSYMLFGLLVSPFLGFYDGFFGPGTGSIMSLACVTLLGFNLPKATAHAKVMNFTSNLASFALFLLGGQILWKVGFVMMAGSILGANLGAKMVMTKGKTLIRPMVVIMSFMMTAKMIYDQGWFHF

SEQ ID NO: 373 - DNA, 957 bp, Haemophilus influenzae
atgtcggataatcaacaaaatttacgtttgacggcgagagtgggctatgaagcgcacttttcatggtcgtatttaaagcctcaatattgggggatttggcttggtattttctttttattgttgttagcatttgtgccttttcgtctgcgcgataaatttgcgggaaaattaggtatttggattgggcataaagcaaagaaacagcgtacgcgtgcacaaactaacttgcaatattgtttccctcattggactgaacaacaacgtgagcaagtgattgataaaatgtttacggttgttacacaagttatgtttggaattggtgagattgcaatccgttcaaagaaacatttgcaaaaacgaagcgaatttatcggtcttgaacatatcgaacaggcaaaagctgaaggaaagaatattattcttatggtgccacatggctgggcgattgatgcgtctggcattattttgcacactcaaggcatgccaatgacttctatgtataatccacaccgtaatccattggtggattggctttggacgattgcacgccaacgtttcggcggaaaaatgcacgcacgccaaaatggtattaaaccttttttaaatcatgttcgtaaaggcgaaatgggttattacttaccagatgaagattttggggtggaacaaagcgtatttgttgatttctttgggacttataaagcgacattgccagggttaaataaaatggcaaaactttctaaagccgttgttattccaatgtttcctcgttataacgctgaaacgggcaaatatgaaatggaaattcatcctgcaatgaatttaagtgatgatcctgaacaatcagcccgagcaatgaacgaagaaatagaatcttttgttacaccatctccagagcaatatgtttggattttgcaattattgcgtacaaggaaagatggtgaggatctttacgattaa

SEQ ID NO: 374 - protein, 318 aa, Haemophilus influenzae
MSDNQQNLRLTARVGYEAHFSWSYLKPQYWGIWLGIFFLLLLAFVPFRLRDKFAGKLGIWIGHKAKKQRTRAQTNLQYCFPHWTEQQREQVIDKMFTVVTQVMFGIGEIAIRSKKHLQKRSEFIGLEHIEQAKAEGKNIILMVPHGWAIDASGIILHTQGMPMTSMYNPHRNPLVDWLWTIARQRFGGKMHARQNGIKPFLNHVRKGEMGYYLPDEDFGVEQSVFVDFFGTYKATLPGLNKMAKLSKAVVIPMFPRYNAETGKYEMEIHPAMNLSDDPEQSARAMNEEIESFVTPSPEQYVWILQLLRTRKDGEDLYD

SEQ ID NO: 375 - DNA, 921 bp, Haemophilus influenzae
ttgctcgttggcaatgaaactgcagacgatgcggcggtgtatgatcttggtaatggaactgcaattatcagtaccacagacttttttatgccgattgtagatgatccttttgattttggacgaattgccgcgaccaatgccattagtgacatttttgctatgggcggtaagccgattatgggaatcgctattttaggttttccaaccaatgtattacctgcagaagttgcacagaaaattgttgatggtggtcgttttgcttgccatcaagcgggtattgctttggcgggtggacattccattgattcgcctgaacctatttttggtttagccgtgacaggtgtgattgacactgaaaaagtaaaacgtaatgcttctgcaaaatcaggttgtaagctttatatgacaaaaccgcttggtattggtattttgacgacggcggagaaaaaaggaaaacttaagccagaacatcaaggtttagccactgccgctatgtgccaaatgaattctattggcagtcaattttcccaagtggatggcgtcacagcaatgacggatgtcactggatttggtttacttggccatttaattgaaatctgtgaaggttcaaatctaagtgcggtagttttttcggacaaaattaaaaccttggacggcgtaaaagattacattgctcaaggttgcgtccctggtggaacagggcgtaattttgaaagttatggacataaagttggcgcattaacggaagaacaaaaagcgattttgtgcgatcctcaaacatcaggtggtttattagtggctgttgagcctaatagcgttcaaactataattgaaatagccaaagatactgacattgatttatatgaagtgggtaaattgaaacctaaatcagaatccgatatcgttgttgaagtaaaataa

SEQ ID NO: 376 - protein, 306 aa, Haemophilus influenzae
MLVGNETADDAAVYDLGNGTAIISTTDFFMPIVDDPFDFGRIAATNAISDIFAMGGKPIMGIAILGFPTNVLPAEVAQKIVDGGRFACHQAGIALAGGHSIDSPEPIFGLAVTGVIDTEKVKRNASAKSGCKLYMTKPLGIGILTTAEKKGKLKPEHQGLATAAMCQMNSIGSQFSQVDGVTAMTDVTGFGLLGHLIEICEGSNLSAVVFSDKIKTLDGVKDYIAQGCVPGGTGRNFESYGHKVGALTEEQKAILCDPQTSGGLLVAVEPNSVQTIIEIAKDTDIDLYEVGKLKPKSESDIVVEVK

SEQ ID NO: 377 - DNA, 351 bp, Haemophilus influenzae
atgtctaacattatcaaacaacttgaacaagaacaattaaaacaaaacgtacctagcttccgcccaggtgatactttagaagttaaagtatgggtagttgaaggtagcaaacgtcgtttgcaagcattcgaaggcgtggttattgcaattcgtaaccgtggcttgcactcagcatttactttgcgtaaagtatctaacggcgtaggcgttgagcgtgtattccaaactcactctccagctgtagattctatcgcagttaaacgtaaaggtgcggtacgtaaagctaaactttactacttacgtgaacgttcaggtaaatcagctcgtattaaagagcgtttaggcgcataa

SEQ ID NO: 378 - protein, 116 aa, Haemophilus influenzae
MSNIIKQLEQEQLKQNVPSFRPGDTLEVKVWVVEGSKRRLQAFEGVVIAIRNRGLHSAFTLRKVSNGVGVERVFQTHSPAVDSIAVKRKGAVRKAKLYYLRERSGKSARIKERLGA

SEQ ID NO: 379 - DNA, 558 bp, Haemophilus influenzae
atgatggtgcaacctttacgggatgcgattcatactgcaaaagcagcggcaggagaaggcgcaaaggtgatttacctttcgccacaaggacgtaaacttgatcaagacggcgtaaccgagcttgctcaaaatcagaaattgattttagtatgtggacgttacgaagggattgatgaacggttgattcaaactgaaattgatgaagaatggtcaatcggcgattacgttctaactggtggggaattgccggcaatgacattaattgatgctgttgcacgttttattcctggtgtattaggcaaacaagcctccgcagaagaagattcttttgcagatggtttattagattgcccgcattacaccagaccggaagtgttagaaggattaactgtaccacccgtgctgatgtcgggacatcacgaagaaattcggaaatggcgattaaaacaatcgctacagagaacgtggttccgacgccctgagctcttagaaggcctagctctgactgacgaacaacgtaagctgttaaaagaggcgcaagccgagcataacagttag

SEQ ID NO: 380 - protein, 185 aa, Haemophilus influenzae
MMVQPLRDAIHTAKAAAGEGAKVIYLSPQGRKLDQDGVTELAQNQKLILVCGRYEGIDERLIQTEIDEEWSIGDYVLTGGELPAMTLIDAVARFIPGVLGKQASAEEDSFADGLLDCPHYTRPEVLEGLTVPPVLMSGHHEEIRKWRLKQSLQRTWFRRPELLEGLALTDEQRKLLKEAQAEHNS

SEQ ID NO: 381 - DNA, 528 bp, Haemophilus influenzae
atggaacaacaacatattgaagttgtgggcaaattaggctcaacctacggtattcgtgggtggttgcgtatttattcatcaacagaacaagctgaaagcatttttgattatcaaccttggtttttaaaaatcaaaggtgaatggcaatcaattgaattagaaaactggcgttatcataatcacgaaatcatcgttaaattaaaaggcgttgatgaccgtgaaactgcacaaattttagcgaatgttgaaattggtgtagatttatctgttttcccagaactagaagagggcgattattactggcacgatttaatcggttgtacagtcgtaaacttagaaggttatacaatgggaacagtaacagaaatgatggaaacgggttctaatgatgtattagtggttaaagccaataccaaagatgcttttggaaaacaagagcggttaattccgtttttgtatgaacaagtagttaaaagagtcgatctcaccacaaaaacaattgaagtggattgggacgctggtttctaa

SEQ ID NO: 382 - protein, 175 aa, Haemophilus influenzae
MEQQHIEVVGKLGSTYGIRGWLRIYSSTEQAESIFDYQPWFLKIKGEWQSIELENWRYHNHEIIVKLKGVDDRETAQILANVEIGVDLSVFPELEEGDYYWHDLIGCTVVNLEGYTMGTVTEMMETGSNDVLVVKANTKDAFGKQERLIPFLYEQVVKRVDLTTKTIEVDWDAGF

SEQ ID NO: 383 - DNA, 249 bp, Haemophilus influenzae
atggtaaccattcgtttatctcgtggcggagctaaaaaacgcccattttatcaaatcgtagtcgctgacagtcgttcacctcgtgacggtcgcttcattgaacgtgtaggtttcttcaatccaattgcacaaggtaatgcagaacgtcttcgcattaatcttgagcgtgtaaatcactgggttgctcaaggtgcttcactttctgatcgtgttgcgagcttggtaaaagaagcacaaaaagcagcataa

SEQ ID NO: 384 - protein, 82 aa, Haemophilus influenzae
MVTIRLSRGGAKKRPFYQIVVADSRSPRDGRFIERVGFFNPIAQGNAERLRINLERVNHWVAQGASLSDRVASLVKEAQKAA

SEQ ID NO: 385 - DNA, 774 bp, Haemophilus influenzae
atgaaaattagttttcattctgtgttaattggattagcatcatttattggtgttcaacaaggtgtaatagctagtccatcttctcatcaatcaatatccactgaatcagctgaggctttgaagcaacaattttcaatggctttagctaaacaagacaaacaacaaattacaaatttacaaaaaaaacttaccgcacttttttctttacctccccaatttcttgataatcagatccaaataagcgaaaaaatcctcactcgcatttttaaaacagataaaaatctcacgcctaaatttcttgattacttatactttgagccaataaatactgttgatgctaatttaattcaggaaatgaagaaaaacttactggtgtcttttttagcaaatgatcaggcaaaaatttatattcgtcaaacagataattcagagcaatttgttcagactttaatggagcggggagcaaaagcagatcaaattatattactgtctttgaatgccaaaggtatatttcaaaaaattattgaacaaatacgtcaagattttccgaatcagactattttttcgattactgaaaatcgtattagtttgattactccttcttcagaaattaagtctcgccttgctttagcaaatatgatgttcaatcgccaatttaaaggtgtggaagttgatgatttctcgtatttagatcaacctcgagaaaatttacagcacaataatgatgcaattcgttacaaaacctttcaagcaatgctagaaggtttaaattaa

SEQ ID NO: 386 - protein, 257 aa, Haemophilus influenzae
MKISFHSVLIGLASFIGVQQGVIASPSSHQSISTESAEALKQQFSMALAKQDKQQITNLQKKLTALFSLPPQFLDNQIQISEKILTRIFKTDKNLTPKFLDYLYFEPINTVDANLIQEMKKNLLVSFLANDQAKIYIRQTDNSEQFVQTLMERGAKADQIILLSLNAKGIFQKIIEQIRQDFPNQTIFSITENRISLITPSSEIKSRLALANMMFNRQFKGVEVDDFSYLDQPRENLQHNNDAIRYKTFQAMLEGLN

SEQ ID NO: 387 - DNA, 1812 bp, Haemophilus influenzae
atgcttttatccaaaaaatcagctacctttgcactcagtgcatttgcgatgcttttcactagtgtagctcttgccaaagaggcaccacaagctcacaaagctgtggaattaagtattttgcacatcaatgatcaccattcttatttagaaccgcacgaaacacggattaatttaaatggtcagcaaaccaaagtggatattggtggtttttctgctgtcaatgcaaaacttaacaaattgcgtaaaaaatacaaaaatccattggtactgcatgcaggcgatgccattactggtacgctttacttcacgctgtttggtggttctgcagatgcagctgtgatgaacgcaggtaattttcattattttactttaggtaatcatgaatttgacgcaggtaatgaagggttattaaaactgcttgaaccattaaaaatccctgtgctttcagctaatgtgattcctgataaaagttcaattttgtataacaaatggaaaccttacgatattttcactgtggatggagaaaaaattgccattatcggtttagataccgtgaataaaacagtgaattcctcttctccgggtaaggatgtgaagttttatgatgaaattgctactgcacaaattatggcaaatgcgctaaaacagcaaggaattaataaaattatcctactttcacacgcaggtagtgaaaaaaatatcgaaattgctcaaaaagtaaatgatattgatgtgatcgttactggcgattcacattatttatacggaaatgatgaattacgtagtttaaaacttccagtaatctatgaatatccacttgaatttaaaaatccaaatggagagcctgtatttgtaatggaaggctgggcttattctgccgtggtgggggatttaggtgttaaattcagtcctgaaggtatagcgtctattactcgtaaaattcctcacgtgttaatgagttctcataaacttcaagtgaaaaattcggaaggtaaatgggctgaattaactggcgatgaacgtaaaaaagcacttgatactttaaaatcaatgaaaagtatttcacttgatgatcacgatgcaaaaaccgataagcttattgctaaatataaaagtgaaaaagatcgcttagcacaagaaattgtgggcgttatcactggttctgcaatgccaggtggttcagcaaaccgtatcccaaataaagcaggatctaatccagaaggttctattgcaacgcgttttattgcagaaacaatgtataacgaactcaaaacagtggatttaactattcaaaatgctggcggtgtacgcgcagatattttaccgggcaatgtaacctttaacgatgcttatactttcttacctttcgggaatacgttatatacctataaaatggaaggttcgttagtgaaacaagtgcttgaagatgcgatgcaatttgctttggttgatggctctacaggcgcattcccttatggtgcaggtattcgttatgaagcgaatgaaacaccaaatgcggaaggtaaacgtttagtgagtgttgaagtcttgaataaacaaacccaacaatgggaaccgattgatgataacaaacgttatcttgtcggaacaaatgcttatgttgcaggcggtaaagacggttataaaacctttggtaaattatttaacgatccaaaatatgaaggcgttgatacctacttgcctgatgcagaaagtttcataaaatttatgaaaaaacatccgcactttgaggcttacacttcatcaaatgtgaaatttaatgcttcaactgatgcattacctaaaaaataa

SEQ ID NO: 388 - protein, 603 aa, Haemophilus influenzae
MLLSKKSATFALSAFAMLFTSVALAKEAPQAHKAVELSILHINDHHSYLEPHETRINLNGQQTKVDIGGFSAVNAKLNKLRKKYKNPLVLHAGDAITGTLYFTLFGGSADAAVMNAGNFHYFTLGNHEFDAGNEGLLKLLEPLKIPVLSANVIPDKSSILYNKWKPYDIFTVDGEKIAIIGLDTVNKTVNSSSPGKDVKFYDEIATAQIMANALKQQGINKIILLSHAGSEKNIEIAQKVNDIDVIVTGDSHYLYGNDELRSLKLPVIYEYPLEFKNPNGEPVFVMEGWAYSAVVGDLGVKFSPEGIASITRKIPHVLMSSHKLQVKNSEGKWAELTGDERKKALDTLKSMKSISLDDHDAKTDKLIAKYKSEKDRLAQEIVGVITGSAMPGGSANRIPNKAGSNPEGSIATRFIAETMYNELKTVDLTIQNAGGVRADILPGNVTFNDAYTFLPFGNTLYTYKMEGSLVKQVLEDAMQFALVDGSTGAFPYGAGIRYEANETPNAEGKRLVSVEVLNKQTQQWEPIDDNKRYLVGTNAYVAGGKDGYKTFGKLFNDPKYEGVDTYLPDAESFIKFMKKHPHFEAYTSSNVKFNASTDALPKK

SEQ ID NO: 389 - DNA, 507 bp, Haemophilus influenzae
atgggtgcaggtaaaagtactatcggtcgtcaattagcacaacagcttaatatggattttattgattccgatgcagtgattgaagaacgtacgggcgcggatattagctggatttttgatttggaaggcgaagacggcttccgaaaacgtgaagaacgcattattaacgaactcacacaaatgcaaggtattgtactttcaactggtgggggagcagtgctttctaaggaaaaccgtaattatttatcagcacgtggtattgtaatttatttagaaacaacggtggaaaaacaattccaacgcactcaacgtgataaaaaacgtccattgctccaagatgcagagaatcctcgtcaagtattggaagatttagcaaaaattcgcaatccgctttatgaagaaattgcggacatcactttgccaactgatgaacaaaatgccaaagtaatggtaaatcaaattgttgatttaattgataatatgaatggattaaatggtgcgctttaa

SEQ ID NO: 390 - protein, 168 aa, Haemophilus influenzae
MGAGKSTIGRQLAQQLNMDFIDSDAVIEERTGADISWIFDLEGEDGFRKREERIINELTQMQGIVLSTGGGAVLSKENRNYLSARGIVIYLETTVEKQFQRTQRDKKRPLLQDAENPRQVLEDLAKIRNPLYEEIADITLPTDEQNAKVMVNQIVDLIDNMNGLNGAL

SEQ ID NO: 391 - DNA, 1089 bp, Haemophilus influenzae
atgttgtgcgtcaatgtggaattgcaagagcgtcgctatcctattttaattggtagcggattgttacaagatgaacgtagttacccgattaaacgtggggatcgcgtgatgattgtaacgaatcccacggttgcacagttttatcttgatacagtcatctatgcgttggaaaaacgtggttgcgtagtcgatcatgttttattgccagatggcgaaaaatacaaaacacttgaatctttaaacttaattttcaccgcacttttgcaagataatcatgggcgagataccacgattattgcattgggcggcggcgtaattggcgatgttgctggctttgtggcggcaagttatcagcgcggtgtgcgtttaattcaaatgccaaccacattgctttcacaagtggattcttcagtgggcggtaaaacggcggttaatcatgaattaggcaaaaatatgattggcgcgttctatcagccatcaatggttattattgatacgctcacgcttaatacgcttcctaaacgtgaagtaaacgcggggcttgccgaagttatcaaatatggtgccattttagattacgaattttttgaatggctagagcaacatattgatgaacttgtcgctttgcatcctgaggcgcttcaacattgtatttctcgttgttgccaaattaaagcagatgttgttgcgagagatgaaacagaaaaaggcgatcgtgcattgcttaatcttggacatacttttggacatgccattgaaactcacttaggttatggaaactggcttcatggtgaagctgtttcgacgggaatgatgatggcagcggtgctttcggaagaacttggagatatttctattgcagatgtgtctcgccttgaaaaattacttgctcgtgccaatttgcccaccgtatcaccggatacgatgcagccagaagactatttaccgcatatgatgcgtgataaaaaagttctatcgggtaaattgcgtctggtgttactcaaatctctaggccaagcttatgtggcgaatgataccgatcataccctcgtgttaaacgcaattcgtcgttgtactcaaacggattaa

SEQ ID NO: 392 - protein, 362 aa, Haemophilus influenzae
MLCVNVELQERRYPILIGSGLLQDERSYPIKRGDRVMIVTNPTVAQFYLDTVIYALEKRGCVVDHVLLPDGEKYKTLESLNLIFTALLQDNHGRDTTIIALGGGVIGDVAGFVAASYQRGVRLIQMPTTLLSQVDSSVGGKTAVNHELGKNMIGAFYQPSMVIIDTLTLNTLPKREVNAGLAEVIKYGAILDYEFFEWLEQHIDELVALHPEALQHCISRCCQIKADVVARDETEKGDRALLNLGHTFGHAIETHLGYGNWLHGEAVSTGMMMAAVLSEELGDISIADVSRLEKLLARANLPTVSPDTMQPEDYLPHMMRDKKVLSGKLRLVLLKSLGQAYVANDTDHTLVLNAIRRCTQTD

SEQ ID NO: 393 - DNA, 861 bp, Haemophilus influenzae
atgttacgtccgaaaaaacaatctttaaaacctaagttaaaacaccgtccatttttaaaatgggcggggggaaaatttcgtttaacggacgagataaataaagcctttccaaacaaaaaaaactgcttaattgagccatttgtgggtgctggagcgatatttctgaattctaattttgaacgctatattttggcagatatcaaccctgatttaatcaatctattcaatattgttaaagaaaatgtagagggttatattgaagattgtaagccgattttcttcgctgatgatgccaatacacccgattattactatgctaaacgtcgccaattcaatgcatcaacagatcctttcgaacgttcgattatttttttatatttgaaccgttttgggtttaacggattatgccgttataacagcaagaatgaatttaatgtgccttttggagcttacaaaactcattattttccagaagatgaattacgttatttcgctcataaagcgcaaagtgcggtatttttatgctgtgattttcaaaaaacttttgaatttgccgataaggattcggtgatttattgtgatccaccttatgctccgctacaacaagagactaattttactggttatgcagggaatgagtttggactagtgcagcaacgtgctttggcagatttagcgaaatctatacaaaaagaaaaacaaatttcgatattgatctcgaatcacgatactaaatttacgcgtgaaatttataacggtgctaaatttaaacgggtaaaagtccaacgttctattagccaaaacccagaaaaacgcgtaaaagtgaaagaattgattgcgatatttggtgctcgtaaataa

SEQ ID NO: 394 - protein, 286 aa, Haemophilus influenzae
MLRPKKQSLKPKLKHRPFLKWAGGKFRLTDEINKAFPNKKNCLIEPFVGAGAIFLNSNFERYILADINPDLINLFNIVKENVEGYIEDCKPIFFADDANTPDYYYAKRRQFNASTDPFERSIIFLYLNRFGFNGLCRYNSKNEFNVPFGAYKTHYFPEDELRYFAHKAQSAVFLCCDFQKTFEFADKDSVIYCDPPYAPLQQETNFTGYAGNEFGLVQQRALADLAKSIQKEKQISILISNHDTKFTREIYNGAKFKRVKVQRSISQNPEKRVKVKELIAIFGARK

SEQ ID NO: 395 - DNA, 726 bp, Haemophilus influenzae
atgtttaaaaggttgtcattatatacgttattactttgtcttgtaccattttttatttggggtatttcctatcagtggcatggcaatagccaattaacccaggctgattattggctttatttgctcactgaaacgggtagcgtaccttatgccttgatcacttgtgtgttatttacgcttttgttcgcatttttattcaaaaatccaaaacaatggatattaggcgtaattgtgatggggatttcagttattgccactcaagccgcaaaaacaggggcaaaaacattgtttgaagaacctcgtcccttcaccgtttatttagcagagcaaatccattcaacacctgaaaatttttataaaaatgaccgcactttgcgtgcagaaatagctaagagtttttattcgatggatgctatcacaccagcttggttagttcatcattatgaaaatgaaacggggtattctttcccctcggggcatacgatttttgcggcaacttggctaatgcttgctgttggctttacccaattattgggtaaccgttcttttaaagcaaaattgctggtggtgggtattgcagtgtggggcttattgatgttgattagccgtgtgcgattaggcatgcattacccaatagatttattggtggcgacattactggcatggttgattaatggcattatttttgcctttttaaagaaaaaggcgatcttcgtcatgaaatag

SEQ ID NO: 396 - protein, 241 aa, Haemophilus influenzae
MFKRLSLYTLLLCLVPFFIWGISYQWHGNSQLTQADYWLYLLTETGSVPYALITCVLFTLLFAFLFKNPKQWILGVIVMGISVIATQAAKTGAKTLFEEPRPFTVYLAEQIHSTPENFYKNDRTLRAEIAKSFYSMDAITPAWLVHHYENETGYSFPSGHTIFAATWLMLAVGFTQLLGNRSFKAKLLVVGIAVWGLLMLISRVRLGMHYPIDLLVATLLAWLINGIIFAFLKKKAIFVMK

SEQ ID NO: 397 - DNA, 651 bp, Haemophilus influenzae
atggcaaaaattcagctagttgcgcaagccaatttacccactgaatatggtattttcagaatggtgggatttgaatttccagataccaaaaaagaacatgtcgccttagtaatgggcgatatttctaatgctgacgaacctgtgttagcacgcatccattctgagtgtttaactggcgatgcgcttcacagcttaaaatgcgattgtgggttccaactggctacagcgttgaaacaaattaaagaagaaggacgcggtgtcttaatttatcatcgtgaagaaggccgcggaattggtttgattaataaaatccgtgcgtattctttacaagataagggaatggataccattgaagccaatcttgctttaggtttcaaagcggatgaacgcaactttgaagtctgtgccgatatgttcgagctacttggtgtaaaaaaagttcgcttgatgaccaacaacccagaaaaaatggaaacaatgaaaaaggcgggtatcaacgtggttgagcgagttccacttaatgttggcgaaaaccgctacaacacaaaatatcttgataccaaagcaaaaaaaatggggcattacattgtgcataacaatgatgaacaacatttaatgacctgcccgcattgccaggaagagattatttaa

SEQ ID NO: 398 - protein, 216 aa, Haemophilus influenzae
MAKIQLVAQANLPTEYGIFRMVGFEFPDTKKEHVALVMGDISNADEPVLARIHSECLTGDALHSLKCDCGFQLATALKQIKEEGRGVLIYHREEGRGIGLINKIRAYSLQDKGMDTIEANLALGFKADERNFEVCADMFELLGVKKVRLMTNNPEKMETMKKAGINVVERVPLNVGENRYNTKYLDTKAKKMGHYIVHNNDEQHLMTCPHCQEEII

SEQ ID NO: 399 - DNA, 1536 bp, Haemophilus influenzae
ttgttcgctttgtgccaacgaagtgcggttattttttctattatttttacggtggaggcttgtgataaattggatagtcctaagcctatttcgccacaaattgagacacaaaaaaatactcaattagaatctaaccgagttgaattaaaacgtggcgtttatagcgatttgactttgcaaccttggcaagcacaaagcgaagaacaaattcaattattacgagatctttttgaaggattaacagcttatgatgtgcaaggtaatcttgttccagctgtagcagaaaattggcaaaccgaagacaataaaacttggattttcactttgcgtgaaaatgctaaatggtcaaatggcgagcctatcactgcatcagattttgtacaatcttggcaaacactttctcaatctgaaagcccaattaaaaattatttggcttttatgaatctgaaaaatgcgaaggcagtattggaaaaagcgttatctgttgaatctctaggattgtttgccgaaaatgaccgcactttacgcattgaattagataaagcatcgccatatttaccttctatgctggcacatgttagtcttttgcctcgctatgctaaatcgactgagatgcttatcagcaatggcgcctatcagttacaaagtcagtctgaaaatcagcatattttaattgccaatccttattattgggcaaaagaaaaagtgatatttcaacaagtgaagtatcaaaaaattacagaagatgcagatttgtctaattttgatgttgtattaaatccgaaaaaagtcgatcagaatatccaagattatccgcaactttgtacttatttttacgaatttaatctttcggatccaacattgcaaaaaagtgcggtaagaaaagcgattgtttcgatgatttctaccaagaatttggttgcagatattgctcatcttcatcctaacaatacttttttgccaaaatcgatgctcggagagcaagaatctgtttgggagccagttgttgcagagcagcttctttcccaaaatcaaattaatgaaactcgtccattgaaattacgtattcgttatgatgattcatctctgaatcaaaccattgcaatgcgattaaatcatcaattatcacaatctgatttattacgagttgaaaatcaagggacgagctggcaagaattgcaaacagctcgcacaaaaggcgattttcaattaattcgttctggctggtgtgctgattttaatgatcctgcagcctttctaaatttattctattcaaaaagcccagataacaaaaatggctataaaaatgcggaatttgatcgtttatttgaaaatgcaatgacgacgacatcagaaaaagtgcggttagaaaattacgtaaaattgaaagagatgattcagcaagaacatttagtgttacctatttttcaatatagtacgccagtttatctcgcaccaagtataatgggcgcgcaagtaaattctgtcggtgtcatttacagtaaagatttgtggagaaaggttcaaagtcaataa

SEQ ID NO: 400 - protein, 511 aa, Haemophilus influenzae
MFALCQRSAVIFSIIFTVEACDKLDSPKPISPQIETQKNTQLESNRVELKRGVYSDLTLQPWQAQSEEQIQLLRDLFEGLTAYDVQGNLVPAVAENWQTEDNKTWIFTLRENAKWSNGEPITASDFVQSWQTLSQSESPIKNYLAFMNLKNAKAVLEKALSVESLGLFAENDRTLRIELDKASPYLPSMLAHVSLLPRYAKSTEMLISNGAYQLQSQSENQHILIANPYYWAKEKVIFQQVKYQKITEDADLSNFDVVLNPKKVDQNIQDYPQLCTYFYEFNLSDPTLQKSAVRKAIVSMISTKNLVADIAHLHPNNTFLPKSMLGEQESVWEPVVAEQLLSQNQINETRPLKLRIRYDDSSLNQTIAMRLNHQLSQSDLLRVENQGTSWQELQTARTKGDFQLIRSGWCADFNDPAAFLNLFYSKSPDNKNGYKNAEFDRLFENAMTTTSEKVRLENYVKLKEMIQQEHLVLPIFQYSTPVYLAPSIMGAQVNSVGVIYSKDLWRKVQSQ

SEQ ID NO: 401 - DNA, 363 bp, Haemophilus influenzae
atgaaaattatttacattattttaggttttctttcacttgcaattggcatcattgggatttttcttcctcttttgcctaccacgccttttttattacttactttatttttcttcacaaaaggttcaaaacgcttagaacaatggtttttaggcacaagtatttatcaaaaacatctcaagtcctttcatgaaaatcgatcattaaagaaaaataccaaaatttttattttgacttttgttaccacaatgctactaattggtttttatttcacgccaagtgtaatagggcgtagtgttattgttgcgttgatttgtattaagttttggttcttcttattttggattaaaaccgaaaatgaataa

SEQ ID NO: 402 - protein, 120 aa, Haemophilus influenzae
MKIIYIILGFLSLAIGIIGIFLPLLPTTPFLLLTLFFFTKGSKRLEQWFLGTSIYQKHLKSFHENRSLKKNTKIFILTFVTTMLLIGFYFTPSVIGRSVIVALICIKFWFFLFWIKTENE

SEQ ID NO: 403 - DNA, 2046 bp, Haemophilus influenzae
atgtctatgtcaaatccattacttaacattcaaggcctaccgccattttcacaaatcaagccagaacacattcgaccagctgttgaaaaattaattcaagattgtcgcaatacgatagaacaagtgttaaaacaaccgcactttacttgggaaaatttcattttgcctttaacggaaactaatgatcgcttaaatcgtgcttggtcgcccgtttctcatctcaattcagtaaaaaatagcactgaattacgtgaagcctatcaagagtgtttacctttactttctgaatacagcacttgggttgggcagcataaagggctttataatgcttatttagcgttaaaaaatagtgctgaatttgccgattattctattgcacaaaagaaagccattgaaaattcactgcgtgattttgaactttcaggcattgggctttccgaagagaaacaacaacgttatggcgaaattgtggcacgcttatcggaattaaattcacaatttagcaataatgtattagatgccacaatgggttgggaaaaactcattgaaaatgaagcagaacttgctggcttacctgaatccgcactacaggcagcacaacaatctgccgaaagtaaaggattgaaaggttatcgttttacgttagaaatcccaagctatctccctgtgatgacttactgcgaaaatcgtgcgttgcgtgaagaaatgtaccgtgcttatgcgacacgcgcctctgaacaaggccctaatgctggcaaatgggacaacagtaaagttatggaagaaattcttacgttacgcgtggaactggcgaaattactcggttttaatacttataccgaactttcacttaccacaaaaatggcagaaaacccacaacaagtgcttgatttcttagatcatcttgccgaacgagccaaaccacaaggcgaaaaagaattacaagaattgagagattactgtgaaaaagaatttggtgtcactgaacttgcgccttgggatattggtttttacagcgaaaaacaaaaacaacatttatacgctattaacgatgaagaacttcgcccatattttcccgaaaatcgcgtaatttcaggactgtttgaattgattaaacgtattttcaatattcgtgcagttgaacgcaaaggcgtggatacttggcataaagatgtacgtttctttgatttaatcgatgaaaatgatcaactccgtggcagtttctatcttgatttatatgcacgcgaacataaacgtggtggtgcgtggatggacgattgtatcggacgtaaaagaaaactcgatggcagtattcaaactcctgtggcttatttgacttgcaacttcaacgcccctatagggaataagccagcgttatttactcacaatgaagtcaccacgctattccacgaatttgggcacggaatccatcatatgctcacgcaaattgatgtatccgatgtggcgggtataaatggcgtgccttgggatgctgtggaattaccaagtcaatttatggaaaactggtgctgggaagaagaggctttggcgtttatttcagggcattacgaaacaggcgagccgttgccaaaagaaaaactcacgcaattgttaaaagcgaaaaatttccaagctgcgatgtttatcttacgtcagcttgaatttgggatttttgatttccgtttacatcacacctttaatgcggaaaaaaccaatcaaattttggatacacttaaatcagtgaaatcacaagttgccgtcataaaaggcgtagattgggcaagagcgccacacagcttcagccatatttttgcagggggctacgccgcaggttattacagctatttatgggctgaagtattatcggctgatgcttattcacgctttgaagaagaaggtattttcaacccaatcaccggcaaatcattcttagatgaaattctcacgcgtggtggctcagaagagccaatggaactcttcaaacgcttccgtggccgtgaaccgcaattagatgcgttgttaagacataaaggaattatgaactaa

SEQ ID NO: 404 - protein, 681 aa, Haemophilus influenzae
MSMSNPLLNIQGLPPFSQIKPEHIRPAVEKLIQDCRNTIEQVLKQPHFTWENFILPLTETNDRLNRAWSPVSHLNSVKNSTELREAYQECLPLLSEYSTWVGQHKGLYNAYLALKNSAEFADYSIAQKKAIENSLRDFELSGIGLSEEKQQRYGEIVARLSELNSQFSNNVLDATMGWEKLIENEAELAGLPESALQAAQQSAESKGLKGYRFTLEIPSYLPVMTYCENRALREEMYRAYATRASEQGPNAGKWDNSKVMEEILTLRVELAKLLGFNTYTELSLTTKMAENPQQVLDFLDHLAERAKPQGEKELQELRDYCEKEFGVTELAPWDIGFYSEKQKQHLYAINDEELRPYFPENRVISGLFELIKRIFNIRAVERKGVDTWHKDVRFFDLIDENDQLRGSFYLDLYAREHKRGGAWMDDCIGRKRKLDGSIQTPVAYLTCNFNAPIGNKPALFTHNEVTTLFHEFGHGIHHMLTQIDVSDVAGINGVPWDAVELPSQFMENWCWEEEALAFISGHYETGEPLPKEKLTQLLKAKNFQAAMFILRQLEFGIFDFRLHHTFNAEKTNQILDTLKSVKSQVAVIKGVDWARAPHSFSHIFAGGYAAGYYSYLWAEVLSADAYSRFEEEGIFNPITGKSFLDEILTRGGSEEPMELFKRFRGREPQLDALLRHKGIMN

SEQ ID NO: 405 - DNA, 1545 bp, Haemophilus influenzae
atggttgctgcaattcaacaacgtgccgaacttcaacgccgtatttggcaaatcgctaatgatgtgcgaggctcggtcgatggctgggacttcaaacaatatgtgcttggcacacttttttaccgttttattagcgaaaattttgccaattacattgaagcggacgatgaaagcgtaaattatgcccaattacctgatgaaatcattacacctgacattaaaacagatgccattaaaaccaaaggctactttatttacccaagccaattatttaagaatgtcgcagctaatgctggcagcaatcctaatttgaataccgatttaaagcagatttttactgatattgaaaactcagcgacgggctttccgtctgaacaagatattaaagggttatttgccgattttgataccaccagcaaccgtttgggcaataccgtaaaagataaaaacgaccgcttaacggctgttttgaaaggcgtggctgaacttgattttggcaaatttgaagataaccacattgatttatttggcgatgcatacgaatatcttatttctaactatgccgccaatgcaggcaaatctggtggcgaatttttcaccccacaaagtgtttccaaactcattgctaaaattgcaatgcacgggcaaacctcggtcaataaaatttatgaccctgcagcaggttctggctcacttttgcttcaagccaaaaaacaatttgatgaacatattattgaagaaggctttttcgggcaggaaattaaccataccacatacaaccttgcccgtatgaatatgtttttgcataacatcaactacgacaagtttgatatcgcccttggcaacaccttaatgaatccgcaatttggcgatgataaacctttcgatgccatcgtttctaacccgccttactccgtgaaatgggttggctccgacgatcccacattgattaacgatgaacgcttcgcccctgctggcgtacttgcaccaaaatccaaagcggattttgcctttattttacacgcattaagctatctttcaggcaaaggcagggcggcgattgtctccttccctggcattttttatcgcggcggtgcggaacaaaaaattcgtcaatatttggtggataataactatgtggaaaccgtgattgcacttgcaccaaatttgttttttggcaccagtatcgcagtgaatattctagtgctttccaaacataaacctaatacccaaacccaatttatcgacgccagcggtttatttaaatccgccaccaataacaacatgttggaagaggaacatattgagcaaattctcaaactgtttgccgataaagaagatgtaccgcatttggcaaaattagttcccattgaagaaatcgccaaaaatgaatacaaccttgcagtgagttcgtatgtggaacaaaaagacactcgcgaagtgattaatattgatgaactcaatgcggaaattcgtaaaacagttgctaatatcgaccgcttgcgtgccgagattgataagattgtggcagagattgaggggtaa

SEQ ID NO: 406 - protein, 514 aa, Haemophilus influenzae
MVAAIQQRAELQRRIWQIANDVRGSVDGWDFKQYVLGTLFYRFISENFANYIEADDESVNYAQLPDEIITPDIKTDAIKTKGYFIYPSQLFKNVAANAGSNPNLNTDLKQIFTDIENSATGFPSEQDIKGLFADFDTTSNRLGNTVKDKNDRLTAVLKGVAELDFGKFEDNHIDLFGDAYEYLISNYAANAGKSGGEFFTPQSVSKLIAKIAMHGQTSVNKIYDPAAGSGSLLLQAKKQFDEHIIEEGFFGQEINHTTYNLARMNMFLHNINYDKFDIALGNTLMNPQFGDDKPFDAIVSNPPYSVKWVGSDDPTLINDERFAPAGVLAPKSKADFAFILHALSYLSGKGRAAIVSFPGIFYRGGAEQKIRQYLVDNNYVETVIALAPNLFFGTSIAVNILVLSKHKPNTQTQFIDASGLFKSATNNNMLEEEHIEQILKLFADKEDVPHLAKLVPIEEIAKNEYNLAVSSYVEQKDTREVINIDELNAEIRKTVANIDRLRAEIDKIVAEIEG

SEQ ID NO: 407 - DNA, 1122 bp, Haemophilus influenzae
atgaaaaacaaccgcacttttttagaaaaattattgaatggggctgaggttgagtggaagctactgcctttagtctcagaaatgcaacgcggaaaaacaataactgcaaaatctacaaatgagggaaaaattcctgtcattagtggaggacaaaaaccagcttattatcatagcgaatcaaaccgtgacggtaagactattacggttgctggtagcggagcttatgctggctatataatgtactgggaagagcctatttttgttagtgatgccttttcaattaaaacagatgaatctttattacaaataaaatacgtttaccattttttattgcaaaatcagcaaaaaatttatgcaatgaagaaagggtctggtgttccccacgtttatcctaaagatatcggaacactaaccatccccattcccccactctccgtccaaaccgaaatcgtaaaaattttggacgcattgacagcacttaccagcgagcttaccagcgagcttatactacgccggaagcagtatgaatactatcgggagaaattattaagtgaagaagagcttgggaaggttgggtttgagtggaagcctctaggagaagtaacaaacataaaaacaggtcaagcagttagtaaatattcaatttcacaaaatcctggaatatatcccgtcattaacagtggtcgtgaacctttaggattcattaatgagtggaatactgaaaatgacccgattggcattacaacaagaggtgctggagttggctcaattacttggcaagaaggtaaatattttcgaggaaatcttaattattctgtcactgtaaaatcagattataaattaaatattcgctttctttaccatatattgcttcattttcaaaaagagattcataatttatgctcttttacaggaattccagcactaaacgccagtgagctaaaaaaattagaaatttctattccagctatcgaagaacaacaacgtatcgtttcaatcctagataaatttgaaaccttaaccaattccatcaccgaaggcttgcctttagcgattgaacaaagccaaaagcggtatgaatattaccgagaattattattgaatttccctggcagagaataa

SEQ ID NO: 408 - protein, 373 aa, Haemophilus influenzae
MKNNRTFLEKLLNGAEVEWKLLPLVSEMQRGKTITAKSTNEGKIPVISGGQKPAYYHSESNRDGKTITVAGSGAYAGYIMYWEEPIFVSDAFSIKTDESLLQIKYVYHFLLQNQQKIYAMKKGSGVPHVYPKDIGTLTIPIPPLSVQTEIVKILDALTALTSELTSELILRRKQYEYYREKLLSEEELGKVGFEWKPLGEVTNIKTGQAVSKYSISQNPGIYPVINSGREPLGFINEWNTENDPIGITTRGAGVGSITWQEGKYFRGNLNYSVTVKSDYKLNIRFLYHILLHFQKEIHNLCSFTGIPALNASELKKLEISIPAIEEQQRIVSILDKFETLTNSITEGLPLAIEQSQKRYEYYRELLLNFPGRE

SEQ ID NO: 409 - DNA, 1155 bp, Haemophilus influenzae
atgactaaaagtttagacaaaattgcaaaacaattaagagattctgataaaaaggttaatctaatttacgcctttaatggaagtggaaaaacccgtttatcaaaagtctttaagaatcttattgcacctaaagaaaatcatgacaatgaagaagatctaacacgaagaaaaattctttatttcaatgcctttaccgaagatttattctattgggataatgatctacttaatgacacagaaccaaaattaaagattcaaccaaattcttttattcgctggttgattagagatcaaggggatgaaggtaaagtaattggaaaatttcatcattattgtgatgaaaaacttatgcctaaatttgatatagaaaataatcaaattacattcagttttgcacgtggagatgatacgcctgaagaaaatataaaactatcgaagggggaagaaagtaattttatttggagtatttttcatacgttaattgaacaagttgttgcagaattaaatatctcagagcctagtgaacgcactactaatgaatttgatgaacttaaatatatctttattgatgatccagtaagttcattggatgaaaatcatcttattcaattagctgttgatttagcagaattagtcaaagatagtcccgatactataaaatttattatcaccacacacaatcctttattttataacgttttatacaatgaacttggagcaaaaaatggttatattctaagaaaagatgaaaataagaatgaaaaagaaagatttgatcttgaggtgaaacaaggtggttcaaacaagagtttctcctatcatctttttctaaaaaatctacttgaagaagttgaacctaaagatattcaaaaatatcacttcatgttactgagaaatttatatgaaaaagctgctaactttcttggttattcaggatggtcaaatctattacccaatgatgatgcaagacaaagctattacactcgtataatcaattttactagtcactctacgttatcaaatgagataatcgctgagccaacagatgccgaaaagaagattgttaaatatttacttggacatctaattaataattatggtttctatatagaagaaaatattaaagacccacaaactgataatataacagagtaa

SEQ ID NO: 410 - protein, 384 aa, Haemophilus influenzae
MTKSLDKIAKQLRDSDKKVNLIYAFNGSGKTRLSKVFKNLIAPKENHDNEEDLTRRKILYFNAFTEDLFYWDNDLLNDTEPKLKIQPNSFIRWLIRDQGDEGKVIGKFHHYCDEKLMPKFDIENNQITFSFARGDDTPEENIKLSKGEESNFIWSIFHTLIEQVVAELNISEPSERTTNEFDELKYIFIDDPVSSLDENHLIQLAVDLAELVKDSPDTIKFIITTHNPLFYNVLYNELGAKNGYILRKDENKNEKERFDLEVKQGGSNKSFSYHLFLKNLLEEVEPKDIQKYHFMLLRNLYEKAANFLGYSGWSNLLPNDDARQSYYTRIINFTSHSTLSNEIIAEPTDAEKKIVKYLLGHLINNYGFYIEENIKDPQTDNITE

SEQ ID NO: 411 - DNA, 999 bp, Haemophilus influenzae
atgaacgacttaatcatctacaacactgacgatggtaaatctcacgttgctttattagttatcgaaaatgaggcttggctgactcaaaatcagcttgcggaactttttgacacctctgtaccaaatataaccactcatataaaaaacatattacaagacaaagagttagatgagttttcagttattaaggattacttaataactgcccaagatagcaaacaatatcaagtaaaacattattcccttgatatgattctcgccatcggctttcgtgtgcgcagccctcgtggtgtacagtttcgtcgttgggcgaatacgcaattacgtacttatttagataaaggttttctattagataaagagcggttgaaaaatcctcaaggtcgatttgatcattttgatgaattactggaacaaattcgcgaaattcgagccagtgaattgcggttttatcaaaaagtacgagagttatttaaattatccagtgactacgataaaacagataaagtcactcaaatgttttttgcagaaacacaaaataagttgatttatgccattacacaacaaaccgccgcagagcttatttgtacgcgtgcaaatgccaaattgcctaatatgggtcttacctcttggaaaggtgctgttgtacgtaaaggcgatattattaccgctaaaaactatttaactcatgatgaattagattctttgaatcgtttagtgatgatctttttagaaagtgctgaattacgcgttaaaaatcgtcaagatctcacattaaatttctggcgtaataatgtcgataatttaattgaatttaacggttttccgttgcttatcggtaatggaacccgaaccgtaaaacaaatggaaacctttaccaaagaacaatatgccttatttgatcaggtcagaaaacaacaaaaacgcatacaagctgataatgaagatttagaaattttagaaaactggcagaaagatctgaaaaagcaaaagcattaa

SEQ ID NO: 412 - protein, 332 aa, Haemophilus influenzae
MNDLIIYNTDDGKSHVALLVIENEAWLTQNQLAELFDTSVPNITTHIKNILQDKELDEFSVIKDYLITAQDSKQYQVKHYSLDMILAIGFRVRSPRGVQFRRWANTQLRTYLDKGFLLDKERLKNPQGRFDHFDELLEQIREIRASELRFYQKVRELFKLSSDYDKTDKVTQMFFAETQNKLIYAITQQTAAELICTRANAKLPNMGLTSWKGAVVRKGDIITAKNYLTHDELDSLNRLVMIFLESAELRVKNRQDLTLNFWRNNVDNLIEFNGFPLLIGNGTRTVKQMETFTKEQYALFDQVRKQQKRIQADNEDLEILENWQKDLKKQKH

SEQ ID NO: 413 - DNA, 3084 bp, Haemophilus influenzae
atgacccaatacaaaactatcgctgaatccaataattttatcgttttagatcaatataataaatttgtggaagaacctaatgctggttaccaaacggaagggagccttgagcgtgagtttattcgtgatttacaggctcaaggctatgagtatttacaagggcttaataatcacgatgaactgattaaaaacttacgtgttcaattacaacggttgaataatgttattttctccgatgcagaatggcaacgttttttagaggaatatttggataaaccgagcgataatctgattgagaaaacccgcaaaattcacgatgattatatttatgattttgtgttcgataacggacgcattcagaatatctatttgctagataagaaaaatcttgccaataattctctgcaagtcatcaatcaatttgagcaaacaggcagctatgataatcgttatgatgtgacaattttggtgaatggtttaccccttgtgcatattgaactgaaaaaacgtggcgtggcgattcgtgaagcctttaaccaaattcaccgttacagcaaagaaagtttcaataaagaaaattctctctttaaatatattcagatttttgtcatttctaatggcacggatactcgctattttgctaatacgactaaacgcaataagaatagctacgacttcacaatgaattgggcaacggcaaaaaatactctgattaaagatttaaaggattttaccgcaactttcttgcaaaagaatactttgctcaatgtgttggtaaattactgcgtgtttgatgtttccgacactctattgattatgcgtccgtatcaaattgccgccactgagcgtattttatggaaaatcaaaagttcatatcacgccaaaaattggagcaacaaagaaagtggtggctatatttggcataccacaggctcaggcaaaaccctcaccagttttaaagcatctcgtcttgcgactgaacttgattttattgataaagtcttttttgtggtcgatcgtaaagacttagactaccaaacgatgaaagaatatcagcgtttttcgcctgatagcgtgaatgggtcggaaagtaccgctgggcttaaacgcaatattgaaaaagatgataacaaaattatcgtaaccaccattcaaaaattgaataatttaatgaaaagtgaagaaaacctgtctatttatcaaaaacaggtggtctttattttcgatgaagcacatcgctcccaatttggcgaagcacaaaaaaatctaaaacgtaaattcaaaaaattctatcaatttggttttactggcacacctattttccctgaaaacgcattaggtgcggaaacgacaacaagtgtgttcggtacggaattgcattcttatgtgattaccgatgctattcgtgatgacaaagtactgaaattcaaggtcgattacaacgatgtccgcccacaatttaaagccttagaaacagaaaaagatcctgaaaaattaaccgcacttgagcagaaacaagcctttttacaccctgagcgtattaaagaaatctcgcaatatttgcttaacaattttaaacaaaaaacccaccgcttgaatgccacaggtaaaggctttaatgcaatgtttgcggtaagcagtgtggaagcagcaaaacgttattacgaaaccttacaaaatttacaggcagagcaggagcatccgttaaaaattgcaacaatcttttcgtttgccgccaatgaagaacaagatgcaattggcgatattccagatgagacctttgaacccactgctctaaacagtacggcaaaagaatttttaacaaaagccattgatgattacaatcactactttggcacgaattatggcgtagatagtcaatcattccaaaattactatcgcgatcttgccaaacgtgtgaaaaatcaggaagtggatttactgattgtagtcggaatgttcttaacaggctttgatgcccctacgttgaatactcttttcgtggacaaaaacttgcgttatcacggattaatgcaggctttttctcgcaccaaccgcatttatgacacaactaaaacctttgggaatatcgtcactttccgcgatttggaacaaaataccattgatgcaatcacgctatttggcgatgacaataccaaaaatatggttttagagaaaagctacgaaacctattttaatggtgatgaaaatcaacgtggttatttagaggttgttcaagagctacaaaatcgctttcctaatccaacagaaatcgaaacagagcaagataaaaaagagtttgtaaaattatttggcgaatatctacgtgtcgaaaatattttgcagaattacgatgagtttgcagcattgcaagccttacaagcggtcgatttaaatgatccgattgcaatggagaaattcaagcaagtacattatgtgaatgatgaacaaattgcagaaatgctgaaagtacccactttaccagtaagagcggagcaagattatcgttcaacttataatgatattcgcgattggctacgccaaagaaaagaagggaatgataaagataattcgccgataaattgggacgatgtcgtatttgaagtggatttattaaaatctcaagaaatcaatttggattatattcttgcgttaattttcgagcatcataagaaaaaccaagacaaagaggtgttaattgatgaaatccgccgcacagttcgttcaagtttaggtaaccgtgctaaagagagcttgattgtcgattttatcaaccaaacaaatttagatgatattcccgataaagcgactttaattgactcattcttcctatttgctcaagcagaacagcgaaaagaagcagaatccttaattcaagaagaaaatttgaatgtcgatgcagcaaaacgctatatcagcacttcattaaaacgcgaatatgccagtgaaaacggcacagcgttaaatgaagtattgccaaaaatgagtccacttactccacaatatctcactaaaaagcagacaattttccaaaaaattgctgcatttgtagagaaatttaaaggggttggtggaaagatttaa

SEQ ID NO: 414 - protein, 1027 aa, Haemophilus influenzae
MTQYKTIAESNNFIVLDQYNKFVEEPNAGYQTEGSLEREFIRDLQAQGYEYLQGLNNHDELIKNLRVQLQRLNNVIFSDAEWQRFLEEYLDKPSDNLIEKTRKIHDDYIYDFVFDNGRIQNIYLLDKKNLANNSLQVINQFEQTGSYDNRYDVTILVNGLPLVHIELKKRGVAIREAFNQIHRYSKESFNKENSLFKYIQIFVISNGTDTRYFANTTKRNKNSYDFTMNWATAKNTLIKDLKDFTATFLQKNTLLNVLVNYCVFDVSDTLLIMRPYQIAATERILWKIKSSYHAKNWSNKESGGYIWHTTGSGKTLTSFKASRLATELDFIDKVFFVVDRKDLDYQTMKEYQRFSPDSVNGSESTAGLKRNIEKDDNKIIVTTIQKLNNLMKSEENLSIYQKQVVFIFDEAHRSQFGEAQKNLKRKFKKFYQFGFTGTPIFPENALGAETTTSVFGTELHSYVITDAIRDDKVLKFKVDYNDVRPQFKALETEKDPEKLTALEQKQAFLHPERIKEISQYLLNNFKQKTHRLNATGKGFNAMFAVSSVEAAKRYYETLQNLQAEQEHPLKIATIFSFAANEEQDAIGDIPDETFEPTALNSTAKEFLTKAIDDYNHYFGTNYGVDSQSFQNYYRDLAKRVKNQEVDLLIVVGMFLTGFDAPTLNTLFVDKNLRYHGLMQAFSRTNRIYDTTKTFGNIVTFRDLEQNTIDAITLFGDDNTKNMVLEKSYETYFNGDENQRGYLEVVQELQNRFPNPTEIETEQDKKEFVKLFGEYLRVENILQNYDEFAALQALQAVDLNDPIAMEKFKQVHYVNDEQIAEMLKVPTLPVRAEQDYRSTYNDIRDWLRQRKEGNDKDNSPINWDDVVFEVDLLKSQEINLDYILALIFEHHKKNQDKEVLIDEIRRTVRSSLGNRAKESLIVDFINQTNLDDIPDKATLIDSFFLFAQAEQRKEAESLIQEENLNVDAAKRYISTSLKREYASENGTALNEVLPKMSPLTPQYLTKKQTIFQKIAAFVEKFKGVGGKI

SEQ ID NO: 415 - DNA, 630 bp, Haemophilus influenzae
atgtcagtatttaatacatttgttgaatttgtcgcgagaattgttgcaccaatgcagcgtcaatttattaattttatccgtattgctatttttattgtaatggcatggatcggtggtttgaaagtttgtcaatatgaggcagatggaattgcccactttgtatcaaatagcccattttttagctatatgtatgaaaaagggccaaatttagtgccgaatgataaaggagagttagtgatggaatatacactacacaaaaatcctgaaggaaagatggttgcaaaaaacatcgaatggcataaagaaaatggcacctatacggcttcttacattattggagcaattattgttactgttggtattcttactttagctggtatttggaatgcaacggcaggtttagcaggaggcctactgacatttggcatgtcaatagtcacgctgtcatttttaatcacaacgcccgaggcttgggtgcctaatctaggtggagatttaccaacgccagcctatggtttcccttatttatctggagttggtcgtttagtgattaaagatattattatgatggcaggtggcttaacagctgcagcagagtgtgcaaatcgaattttagcacgtaaaaaataa

SEQ ID NO: 416 - protein, 209 aa, Haemophilus influenzae
MSVFNTFVEFVARIVAPMQRQFINFIRIAIFIVMAWIGGLKVCQYEADGIAHFVSNSPFFSYMYEKGPNLVPNDKGELVMEYTLHKNPEGKMVAKNIEWHKENGTYTASYIIGAIIVTVGILTLAGIWNATAGLAGGLLTFGMSIVTLSFLITTPEAWVPNLGGDLPTPAYGFPYLSGVGRLVIKDIIMMAGGLTAAAECANRILARKK

SEQ ID NO: 417 - DNA, 93 bp, Haemophilus influenzae
atgggaaaatcaaattttattttaattagtaaaacttttcaaatttctccgttatttacctttatattaaagggaattgattttgctttttaa

SEQ ID NO: 418 - protein, 30 aa, Haemophilus influenzae
MGKSNFILISKTFQISPLFTFILKGIDFAF

SEQ ID NO: 419 - DNA, 1797 bp, Haemophilus influenzae
atgaaaaatttcaaatattttgctcagagttatgtggattgggttattcgtcttgggcgtcttcgtttttctcttttaggcgtgatgattctcgcggttttagccctttgtactcagattttatttagtctatttattgttcatcagatatcttgggtagatatttttcgttctgtaacttttggcttactcactgcgccttttgttatttattttttcactttattagtagaaaaacttgaacattctcgtcttgatctttctagctcggttaatcgattggaaaatgaggtcgccgagcgaattgctgctcagaaaaaattatcccaagcattggaaaagttagaaaaaaatagccgtgataaaagtaccttacttgccacaataagccatgaatttcgcacgccattgaatgggattgtcgggcttagtcaaattttacttgatgatgaattggatgatctccagcgtaattatttaaaaactatcaacataagtgcggtcagtttaggctatatttttagcgatattattgatttggaaaaaattgatgccagccgaattgaattaaatcgccagccaacagatttccccgccttattaaacgatatttataattttgctagtttcctcgccaaagaaaaaaatcttattttttctttagagcttgaacctaatttgcctaattggttgaatcttgatcgtgttcgcttgagccaaattttgtggaacttaattagtaatgcggtgaagtttacggatcagggaaatattattcttaaaattatgagaaatcaggattgttaccattttattgtgaaagatacaggaatggggatttcacctgaagaacaaaaacatatttttgaaatgtattatcaagtgaaagaaagccgtcagcaaagtgcgggtagcggtattgggttggctatttctaaaaatctcgctcagttaatggaaggggatttaacagttgaaagtgagcgaggaaaaggcgcgactttccatcttactctccacgctcaggaaatttctgaaaaagaatctgttaagaaaaatataccatccttgaatattcttttagtggaagatgttgatctcaatattatggttgcaaaaactattttagaaaaacttgggcatcatgttgatgttgcgacaaatggcaagcaggcgattactttatttgagaaaaatgtttacgacattctattgctcgatattaaattaccagatatgagtggttttgaaattgcccaatatttgcgagagaactatgaaaacggtatttatgattttttaccgccaatgattgcttttaccgcgaatgttatgcaaagcgagcaagaatatttagaaatgggcatggatggcgtattacgtaaacccatttcaattaaggatttacaccattgtctacagcaattttttgcagatgaaagcgaatctattatagaaatgaatgatgataatgagctttcagaacagtttgatttagcgctgatagaaacacttggaaaaaaacaaattttagaaaatttatctttattcaaacaaactatgccaaattatctggctcaattatcaaaagataatatgaaagaaacagaagataccgcccataaaattaaaggcgcagcggcatcggtagggttaaatcatttacgtcaattagcggatactttagaaagtgcggctaaaaattctgatgtttttaattgtggagaattgattgatgaaattggaaatctttggttagaagatgtggaggatttgcttaaattttgtaaattttaa

SEQ ID NO: 420 - protein, 598 aa, Haemophilus influenzae
MKNFKYFAQSYVDWVIRLGRLRFSLLGVMILAVLALCTQILFSLFIVHQISWVDIFRSVTFGLLTAPFVIYFFTLLVEKLEHSRLDLSSSVNRLENEVAERIAAQKKLSQALEKLEKNSRDKSTLLATISHEFRTPLNGIVGLSQILLDDELDDLQRNYLKTINISAVSLGYIFSDIIDLEKIDASRIELNRQPTDFPALLNDIYNFASFLAKEKNLIFSLELEPNLPNWLNLDRVRLSQILWNLISNAVKFTDQGNIILKIMRNQDCYHFIVKDTGMGISPEEQKHIFEMYYQVKESRQQSAGSGIGLAISKNLAQLMEGDLTVESERGKGATFHLTLHAQEISEKESVKKNIPSLNILLVEDVDLNIMVAKTILEKLGHHVDVATNGKQAITLFEKNVYDILLLDIKLPDMSGFEIAQYLRENYENGIYDFLPPMIAFTANVMQSEQEYLEMGMDGVLRKPISIKDLHHCLQQFFADESESIIEMNDDNELSEQFDLALIETLGKKQILENLSLFKQTMPNYLAQLSKDNMKETEDTAHKIKGAAASVGLNHLRQLADTLESAAKNSDVFNCGELIDEIGNLWLEDVEDLLKFCKF

SEQ ID NO: 421 - DNA, 645 bp, Haemophilus influenzae
ttgatttttcatatttttcaaatagactttatatattcatttctaatctccttcattatgcttaaaaatttagacgaaataacttcaagtattatcgctgatcctcaaaataaagattttacagaacgtggaattttccctttattttcggcgcctaaaacagctcgaattaatattgttggtcaagctcctgggttaaaagctgagcaatctcgtttgtattggaatgataaaagcggtgatcgtctgcgagaatggttgggagtagattacgattatttttataattctgggatatttgcggttcttcccatggatttctattatcctggaaaaggtaaatcgggtgatttaccacctcgtcaaggttttgcagaaagatggcatccaatgattttagggaatctacctaatattcagctcactattcttattgggcaatatgcacagaaatattatttacccgaaaataaagataatgtaactaacactgttaaaaattatcgtcaattcttaccgcactttatgcctctcgtgcacccttccccacgtaatcagctttgggcaacaaagaatccttggtttgaagagcaagttattcctgaattacaaattttagtcaaacagataattaataaagattaa

SEQ ID NO: 422 - protein, 214 aa, Haemophilus influenzae
MIFHIFQIDFIYSFLISFIMLKNLDEITSSIIADPQNKDFTERGIFPLFSAPKTARINIVGQAPGLKAEQSRLYWNDKSGDRLREWLGVDYDYFYNSGIFAVLPMDFYYPGKGKSGDLPPRQGFAERWHPMILGNLPNIQLTILIGQYAQKYYLPENKDNVTNTVKNYRQFLPHFMPLVHPSPRNQLWATKNPWFEEQVIPELQILVKQIINKD

SEQ ID NO: 423 - DNA, 906 bp, Haemophilus influenzae
atgaattttacgttattgacatatttagcggattgtcagacaaaagtgcggtctgaattggaaaaattttctaaaaatctagaggaagatattcaacaattacgtgaaattggtttggatattctcgttgatggacaagattatcgcttagtgccaatgcttcctttattaaatcctcagcaaatttcaaccgcactttttccttatagtatccattatcagccgattatttcctctacaaatgaatggatactacaaaatattctttcattaaaaaaaggagatctttgtgtggcagaatatcaaactgcagggcgcggtcggcgtggtcgccaatggttatcgccttttgctgggcaaatcatgtttagtttttattggacgtttgatcctaaaaaatcaattgaggggttaagtttagtcatcggtttggcgattgcggaagtgctaaatgtacaagtgaaatggccaaatgatattttgtttgatgaaagaaagttaggtggcattttagttgaaattgctaatcataaaaatggcatgctcaatttagtgattggcgtaggtattaatgtgtcgttgtcaaaacaaacagaaattagtcagccttatgcggaagtgtgtgaaattgatcctgatgtagagcgacaaactttattacccaaacttatacaacatttatatacacgtttaaatatctttgaacaaaatggtattgatgaggaatttcaacaggcatggcaatcatataatgcgttttcaaatagtgaaataaatgtgcttactgagcaaggcgttatttcaggtattgaacaaggcatagatgaacgtggttatttaaaagtattatgtggcaataaaattcagatgtttaatggtggagaagtttcattacgtaagaaataa

SEQ ID NO: 424 - protein, 301 aa, Haemophilus influenzae
MNFTLLTYLADCQTKVRSELEKFSKNLEEDIQQLREIGLDILVDGQDYRLVPMLPLLNPQQISTALFPYSIHYQPIISSTNEWILQNILSLKKGDLCVAEYQTAGRGRRGRQWLSPFAGQIMFSFYWTFDPKKSIEGLSLVIGLAIAEVLNVQVKWPNDILFDERKLGGILVEIANHKNGMLNLVIGVGINVSLSKQTEISQPYAEVCEIDPDVERQTLLPKLIQHLYTRLNIFEQNGIDEEFQQAWQSYNAFSNSEINVLTEQGVISGIEQGIDERGYLKVLCGNKIQMFNGGEVSLRKK

SEQ ID NO: 425 - DNA, 1467 bp, Haemophilus influenzae
atgtcattacgcattaaacaagaagcccttacttttgacgatgttctactcgtcccagctcactcaactgtgcttccaaatactgccaacctttcaactcaacttaccaaagaaattcgcctaaatattccaatgctttcagcagcaatggataccgtaactgaaaccaaacttgcgatctctttagcacaagaaggcggtattggctttattcataaaaatatgacgatcgaacgccaagcagatcgtgttcgtaaagtaaaaaaattcgaaagtggtatcgtttctgaaccagtaactgttttaccaaatttaacgcttgccgaacttgctgaaatggtgaagaaaaacggatttgcgggctaccctgttgtagatggggaaaataacttaatcggtatcattactggccgtgatacacgtttcgtaaaagatttaagcaaaacagtttcacaagtaatgacgaaaaaagaagacttggtgaccgtaaaagaaggggcgagtcgcgaagaaattttggaattaatgcatcaacaccgtgttgaaaaagtattagtggttaatgatagtttcaaacttaaaggaatgattaccgttaaagacttccaaaaagcagaacaaaaaccaaatgcatgtaaagatgaattcggtcgtttacgtgtcggtgcggctgtaggtgcaggtgctggcaatgaagaacgtattgatgcattagtaaaagctggggtggatgtgttgttaatcgactcttcacacggtcactcagaaggcgtattacaacgcgttcgtgaaacgcgtgcaaaatatccaaatttgcctatcgttgcaggtaacgtagcgactgctgaaggtgctatcgcattagcagacgcaggcgcaagtgctgtaaaagtaggtattggcccaggttcaatttgtacaactcgtattgtaactggcgtaggtgttccacaaatcacggctatcgcagatgcagcagcagcattaaaagatcgtggcattccagttatcgcagacggcggtatccgcttctctggtgatattgcaaaagctatcgctgcaggcgcaagctgtgtaatggttggttctatgtttgcgggtactgaagaagctccaggtgaaatcgaactttatcaaggtcgtgcatttaaatcttaccgtggtatgggctcattaggtgccatggctaaaggctcttcagaccgttatttccaatcggataatgcggcagacaaactcgtaccagaaggtattgaagggcgtattccatacaaaggttacttaaaagaaatcatccaccaacaaatgggtggcttacgttcttgtatgggcttaacgggctgtgcaactattgatgaactacgcaccaaagcggaatttgttcgcattagcggtgcaggcattaaagaaagccacgttcacgatgttactattactaaagaagcaccgaactatcgtatggggtaa

SEQ ID NO: 426 - protein, 488 aa, Haemophilus influenzae
MSLRIKQEALTFDDVLLVPAHSTVLPNTANLSTQLTKEIRLNIPMLSAAMDTVTETKLAISLAQEGGIGFIHKNMTIERQADRVRKVKKFESGIVSEPVTVLPNLTLAELAEMVKKNGFAGYPVVDGENNLIGIITGRDTRFVKDLSKTVSQVMTKKEDLVTVKEGASREEILELMHQHRVEKVLVVNDSFKLKGMITVKDFQKAEQKPNACKDEFGRLRVGAAVGAGAGNEERIDALVKAGVDVLLIDSSHGHSEGVLQRVRETRAKYPNLPIVAGNVATAEGAIALADAGASAVKVGIGPGSICTTRIVTGVGVPQITAIADAAAALKDRGIPVIADGGIRFSGDIAKAIAAGASCVMVGSMFAGTEEAPGEIELYQGRAFKSYRGMGSLGAMAKGSSDRYFQSDNAADKLVPEGIEGRIPYKGYLKEIIHQQMGGLRSCMGLTGCATIDELRTKAEFVRISGAGIKESHVHDVTITKEAPNYRMG

SEQ ID NO: 427 - DNA, 111 bp, Haemophilus influenzae
ttgtggatatttgtcatttataatgctcttattattgatagtgtaagcggttcatattatttaaaactttgcaaaaaccaaccgcactttaaacagcaaaaggcaggctaa

SEQ ID NO: 428 - protein, 36 aa, Haemophilus influenzae
MWIFVIYNALIIDSVSGSYYLKLCKNQPHFKQQKAG

SEQ ID NO: 429 - DNA, 1572 bp, Haemophilus influenzae
atgacaaatatccacaatcacaaaatcctgatcctcgactttggctcacaatatactcaactgattgcacgtcgtgtgcgtgaaatcggtgtgtactgtgaactttgggcttgggatgtaaccgaacaacaaatccgtgaatttgctccaacgggtatcattctttctggcagccctgaaagcacaactgaagaaaatagccctcgtgcaccggaatatgtatttaatgctggtgtaccagtattaggcgtttgctatggaatgcaaacgatggcgatgcaacttggcggtttaaccgaaacgtctgatcaccgagagttcggctatgcttcagtttctcttgaaaattccaccgcactttttgcaaatttaaacgataattcgaccgcttctgagccgaagttagacgtttggatgagccacggcgataaagtaacgcgcttaccagaaaacttcaaagtaactggcacaacgccaacctgcccaattgcggcaatgtcggacgaaaatcgtcgtttctacggcgtacaattccaccctgaagtaacacatactaaaaaaggtttagaattattaactaattttgtcgtgaatatctgtggttgcgaaactaaatggacagctgaaaacattatcgaagatgccgttgctcgtattaaagagcaagtaggcgatgatgaagtgattttaggcttatctggtggtgtggactcttctgtggttgcattacttttacaccgtgctatcggcaaaaacttacactgcgtatttgtggataacggtttactccgcttacacgaaggcgaccaagtcatggaaatgtttggcgataaattcggtttaaacatcactcgtgttgatgctgaaagtcgtttcttaggtgaacttgcaggcgtatctgatcctgaagcaaaacgtaaaattatcggtaaagtattcgttgatgtattcgatgatgaatcgaaaaaactcactaatgtgaaatggttagcacaaggtacgatctaccctgatgtcatcgaatctgcagccagcaaaacaggcaaagcccacgtcattaaatcacaccataacgtaggtggcttaccagactatatgaaacttggcttagttgaaccgttacgtgagttatttaaagatgaagtgcgtaaaatcggtttggcattaggcttaccagctgaaatgatcaaccgccacccattccctggcccaggcttaggcgtgcgagtattaggcgaagtgaaaaaagaatactgtgatttattacgccgtgcggatgcgatctttatcgaagaattacgcaacagcggttggtatgaaaaaaccagccaagcgttcagcgtattcttaccagtgaaatctgtaggcgtaatgggcgatggccgtaaatacgattgggttatttccctacgcgcggtagaaacaatcgattttatgaccgcacattgggcacatttgccttatgatttattaggcaaagtgtctaaccgtatcatcaacgaagtgaatggcatttcccgcgtcgtgtacgacatcagcggaaaaccacccgcaacaatcgagtgggaatag

SEQ ID NO: 430 - protein, 523 aa, Haemophilus influenzae
MTNIHNHKILILDFGSQYTQLIARRVREIGVYCELWAWDVTEQQIREFAPTGIILSGSPESTTEENSPRAPEYVFNAGVPVLGVCYGMQTMAMQLGGLTETSDHREFGYASVSLENSTALFANLNDNSTASEPKLDVWMSHGDKVTRLPENFKVTGTTPTCPIAAMSDENRRFYGVQFHPEVTHTKKGLELLTNFVVNICGCETKWTAENIIEDAVARIKEQVGDDEVILGLSGGVDSSVVALLLHRAIGKNLHCVFVDNGLLRLHEGDQVMEMFGDKFGLNITRVDAESRFLGELAGVSDPEAKRKIIGKVFVDVFDDESKKLTNVKWLAQGTIYPDVIESAASKTGKAHVIKSHHNVGGLPDYMKLGLVEPLRELFKDEVRKIGLALGLPAEMINRHPFPGPGLGVRVLGEVKKEYCDLLRRADAIFIEELRNSGWYEKTSQAFSVFLPVKSVGVMGDGRKYDWVISLRAVETIDFMTAHWAHLPYDLLGKVSNRIINEVNGISRVVYDISGKPPATIEWE

SEQ ID NO: 431 - DNA, 840 bp, Haemophilus influenzae
ttggcatattgtatttatttagtatatgggctccaaccacttagcggaacggatgtttttgcgtggcgtatgctgaccatgatctttgggttacttttaattttattcccgactattggttgccgctctcttttgtctcttatcacgacaacgttaggaaaaagttggacgcgttgggttttatttttactggggacattagatgcgggaagtcaattctggctctttatgtgggctccgctaaatggcgaagggataaatattgcgatgggatatttccttttccctctgatcatggctattttaggatgggcttggttaaaagaacgcttatcatttattcagaaaatcgcgcttttactggcggcctgcggtgttgcacatgaattatggcacactcaaagtttttcgtggacaagcttgtgggtttgtacggtttatccattttattatctaagccgtaaatggatgaaaatccctgctctacaaggaattacattggatattattttaatttcgattccttgttttatttatattctttctcaaagcgatacgctttctttggttacgcaagaatatcgttattggttattgctaccagcacttggtattgtgagtgcgatttcgctttcagccaacttaaaatcaagccaacaaattccagttagtatttttgcggtgttgagttatattgaacccatattgctttttttaatagctgtctttgtgctagataatcaaataaccacaagtgactattttacttatgtgcctatttggttaagtctcattgtgattggcatagaagggcttttaaacaaaaagaaagtgcggtga

SEQ ID NO: 432 - protein, 279 aa, Haemophilus influenzae
MAYCIYLVYGLQPLSGTDVFAWRMLTMIFGLLLILFPTIGCRSLLSLITTTLGKSWTRWVLFLLGTLDAGSQFWLFMWAPLNGEGINIAMGYFLFPLIMAILGWAWLKERLSFIQKIALLLAACGVAHELWHTQSFSWTSLWVCTVYPFYYLSRKWMKIPALQGITLDIILISIPCFIYILSQSDTLSLVTQEYRYWLLLPALGIVSAISLSANLKSSQQIPVSIFAVLSYIEPILLFLIAVFVLDNQITTSDYFTYVPIWLSLIVIGIEGLLNKKKVR

SEQ ID NO: 433 - DNA, 600 bp, Haemophilus influenzae
ttgaatgactactttcatcttgaacctcatctcatcaatgtgattattataaaaccccaaggcaataaaaaatctcaactttatttttttattgtgataatatttttctcaatggttacatttttgagaaattatcttatgcaaacactggataaattagatcgtaatattttgaatgtattacaacaagatgccatgattccgttaaaagaactgtcagagaaagtgaatagttccgttgcaacctgtcaacgacgtgtgcaagcattaactgattcaggcgttattacaaaacgagttgcagttgtttccccaaaagccgttgggcgtacgattagcgtatttgtcatggtcgaaatggataatcaacattcttattatcaagagcaatttgaacggaaaatgcgtcaagaagacgaagtggtaagctgttacgaaatctcaggggactatgattttatgttgctactccatgcaaaagatatggaaagctatcacgcattcacacgccgagtattgacgggtgaatttcatgtaagaacttataaaagtttatttgtaatgaattttaccaaagcagatagtggaattatcttatag

SEQ ID NO: 434 - protein, 199 aa, Haemophilus influenzae
MNDYFHLEPHLINVIIIKPQGNKKSQLYFFIVIIFFSMVTFLRNYLMQTLDKLDRNILNVLQQDAMIPLKELSEKVNSSVATCQRRVQALTDSGVITKRVAVVSPKAVGRTISVFVMVEMDNQHSYYQEQFERKMRQEDEVVSCYEISGDYDFMLLLHAKDMESYHAFTRRVLTGEFHVRTYKSLFVMNFTKADSGIIL

SEQ ID NO: 435 - DNA, 1167 bp, Haemophilus influenzae
gtgataaaactgatccaacgtttttttaaattagaatctgctggcggtatattattgcttttttcagctgttgttgcgatgttgctggctaattcgccgttaagcaaccaatataatgattttttaaatttgcctgtaagtttacaaattggtagtttctcaattaataaaaccttaattcactggattaacgatggttttatggcggtgttttttgtattagtgggaatggaagtcaaaaaagaattatttgaaggcgcgctttctacctatcaacaagctattttccctgctattgcagctattggcggaatggttataccggctgtagtttattggtttatcgctaaacaagatccaagtttagctaatggctgggcaattccaatggcaacagacattgcttttgcactgggaattatggcgttattgagtaaacaagtaccacttccactgaaaatatttttacttgcccttgctattattgatgacctcggtgcgatagttgttattgcattatttttctcgcacggattgagtgtacaagcactaattttttctgctgtggcaattattgcgctgatattactaaatcgtttcaaagtttccgcactttgcgcttatatggtcgtaggtgcaattttatgggcttccgtattaaagtctggtgtgcatgctactttagcaggcgttattattggttttagcattccattgaaaggtaaaaaaggagaacgcccattagatgatttcgagcatattttatcctcttggtcatctttcgttattttaccacttttcgcatttgccaatgctggtgtgagttttgcaggcatagatgtgaatatgatttcgtcgccattattattggctatagcaagcggtttaattattggtaaaccagtcggtatatttggatttagttatatttctgttaaattgggattagctaaattaccagatggaattaattttaaacaaatttttgctgttgcggttttatgtggaatcggttttacgatgtcaatgttcttagcaagccttgcatttgatgctaatgcgggggaaagtgtcaatacgctttctcgtttaggtattctacttggatcaactgtttcggcaatacttggttatttattcttaaaacagacgacaaaactaagttaa

SEQ ID NO: 436 - protein, 388 aa, Haemophilus influenzae
MIKLIQRFFKLESAGGILLLFSAVVAMLLANSPLSNQYNDFLNLPVSLQIGSFSINKTLIHWINDGFMAVFFVLVGMEVKKELFEGALSTYQQAIFPAIAAIGGMVIPAVVYWFIAKQDPSLANGWAIPMATDIAFALGIMALLSKQVPLPLKIFLLALAIIDDLGAIVVIALFFSHGLSVQALIFSAVAIIALILLNRFKVSALCAYMVVGAILWASVLKSGVHATLAGVIIGFSIPLKGKKGERPLDDFEHILSSWSSFVILPLFAFANAGVSFAGIDVNMISSPLLLAIASGLIIGKPVGIFGFSYISVKLGLAKLPDGINFKQIFAVAVLCGIGFTMSMFLASLAFDANAGESVNTLSRLGILLGSTVSAILGYLFLKQTTKLS

SEQ ID NO: 437 - DNA, 1275 bp, Haemophilus influenzae
atgatcttcgccttatttttaggtgcgggtaatatcatttttccgcctatggaaggattttcctcaggacaacattggacgagtgcttccttaggctttgttttaactggcgttttaatgccatttattacgcttgttgtggtagcgattttaggtcgtggcgaagaacttactaaagatttaccaaaatgggctggcacaggtttcctcgttatactttatttaaccattggctctacctttgcaatgccccgcatcactaatgttgcttatgaaatggcgtggttgcctttaggcttaacagaaaataatgcgaatgttcgttttgtattctcactaatttttaacttaatcgcgatgggctttatgattagcccaaatacgatcatttcaagcgtgggtaaatttatgacaccagctttattagtgttacttattgctgtggcaattaccgtatttatttcgcctttatctgaaattcaagcgccaagtaatgcttatgaaaatagccattctttattaatcggtttaactagcggctatcaaaccatggatgtactcgcagccatcgctttcggtggaattgtcgcccgagcattatcagcgaaaaatgtgacaaaaaccaaagatattgtgaaatacaccatttcagcaggatttgtttcagtcatcttactcgccagtttatatttttcgcttttctatctaggtgcaaccagtgctgcagttgcagaaggggcaacgaatggtggacaaattttctctcgttatgtaaatgtcttattcggttcagctgggacttggattatggcgggtattattgtattagcgagcttaacaacacttgttggtgtaactagcgcatctgctgattattttgcaaaattttcctctcgcttttcctatccattttggatcgccctttttaccgcaatgacaatcactgtttcacaatatggtttaacggatctacttcgcataacgatcccagccttgttattaatttacccagtagctattgtgcttgttttattgcaattcctacgaaaaaaacttccatcaataaaatttacatacaatagtacattgctcgttacggtttgttttagtttatgtgacagcttaaataacgttaaaatgttaccagaaagcatcaattcattattgaaacacttccctctttcatctgaaggaatggcttggttggttccgactttagtaatgttagttgcaagcatttttattggaaaagcattgcgtaaaacccattcttaa

SEQ ID NO: 438 - protein, 424 aa, Haemophilus influenzae
MIFALFLGAGNIIFPPMEGFSSGQHWTSASLGFVLTGVLMPFITLVVVAILGRGEELTKDLPKWAGTGFLVILYLTIGSTFAMPRITNVAYEMAWLPLGLTENNANVRFVFSLIFNLIAMGFMISPNTIISSVGKFMTPALLVLLIAVAITVFISPLSEIQAPSNAYENSHSLLIGLTSGYQTMDVLAAIAFGGIVARALSAKNVTKTKDIVKYTISAGFVSVILLASLYFSLFYLGATSAAVAEGATNGGQIFSRYVNVLFGSAGTWIMAGIIVLASLTTLVGVTSASADYFAKFSSRFSYPFWIALFTAMTITVSQYGLTDLLRITIPALLLIYPVAIVLVLLQFLRKKLPSIKFTYNSTLLVTVCFSLCDSLNNVKMLPESINSLLKHFPLSSEGMAWLVPTLVMLVASIFIGKALRKTHS

SEQ ID NO: 439 - DNA, 357 bp, Haemophilus influenzae
gtgctttggtctttattccttaatcatcgttatttgttagaggcaagttttcatctcacgctaaatttaattcaaaatggctatgcgcaaaaaccaattgcaggtcgtcggggagataatgttaaacttattggcgaaaataatgccaccttaggtgtcacaaagggtaaatttggcaaacaagaaaacatttatcaacaactttggtgcttaccacaagtggaagagcaatacttgcaagtttgtacttttaccgtgggagggtattatgacggcacttgcctacgttctgattcgagtcgagtgattgtaggcaatagtgatatgcaaccattgagagtgttgaaagataaataa

SEQ ID NO: 440 - protein, 118 aa, Haemophilus influenzae
MLWSLFLNHRYLLEASFHLTLNLIQNGYAQKPIAGRRGDNVKLIGENNATLGVTKGKFGKQENIYQQLWCLPQVEEQYLQVCTFTVGGYYDGTCLRSDSSRVIVGNSDMQPLRVLKDK

SEQ ID NO: 441 - DNA, 450 bp, Haemophilus influenzae
gtgcatcataaggatttgttagcaaaatgtagtgattggttaacaaggaagctaacaaaaggagcttattctcactgtgaaattgttgtaagaaaagaagagtttttaactggtcatcattatgaagtagaagttatatatgactgttactcatcgtctattcgagacggcggtgtacgttgcaagcaaattgatgtttatgatagagaaaaatgggatttaattgagctagagggagttactgaagcacaaatcaaagcctattttgaccgcactttgggctgtaaatatgactggtggggcgcgttaggtatcgtactaggcatcaaacaaaaacgctcaaaatatttttgcagtgaatggtgttttaatgcgatttgcggtggggaaaatggttggcggtttagtccgaatcaactagcggctatatttaataaagagaaaagttaa

SEQ ID NO: 442 - protein, 149 aa, Haemophilus influenzae
MHHKDLLAKCSDWLTRKLTKGAYSHCEIVVRKEEFLTGHHYEVEVIYDCYSSSIRDGGVRCKQIDVYDREKWDLIELEGVTEAQIKAYFDRTLGCKYDWWGALGIVLGIKQKRSKYFCSEWCFNAICGGENGWRFSPNQLAAIFNKEKS

SEQ ID NO: 443 - DNA, 417 bp, Haemophilus influenzae
gtgaactctttagatgagctatttaagcagcgtttctataattgcattagaatagccgatggttatctgaatggcttagaagttattaatgagtcttttcatcaaatattacctaagtttatagataaagaaaaggtattattaatattagatccaccatatttgtgcacaagacaggaaagctacaaacaggcgagttattttgatttaattgacttcctacgattaattcacctcacaaagccaccctttatcttcttcagctcaacaaaatccgaatttattcgatttattgaggcgatggtggaagataaatgggataattggcaagtatttaatgaagtcaatcgaattacagttaatgcatcagcaagttataacggtaagtacgaggataatttaatttataaattttaa

SEQ ID NO: 444 - protein, 138 aa, Haemophilus influenzae
MNSLDELFKQRFYNCIRIADGYLNGLEVINESFHQILPKFIDKEKVLLILDPPYLCTRQESYKQASYFDLIDFLRLIHLTKPPFIFFSSTKSEFIRFIEAMVEDKWDNWQVFNEVNRITVNASASYNGKYEDNLIYKF

SEQ ID NO: 445 - DNA, 447 bp, Haemophilus influenzae
atgaatttaactaaaattttaccagcatttgctgctgtagtcgtattatctgcttgtgcaaaggatgcacctgaaatgacaaaatcatctgcgcaaatagctgaaatgcaaacacttccaacaatcactgataaaacagttgtatattcctgcaataaacaaacggtgactgctgtgtatcaatttgaaaaccaagaaccagttgctgcaatggtaagtgtgggcgatggcattattgccaaagattttactcgtgataaatcacaaaatgactttacaagtttcgtttctggggattatgtttggaatgtagatagtggcttaacgttagataaatttgattctgttgtgcctgtcaatttaattcaaaaaggtaaatctagcgataatatcatcgtcaaaaattgtgatgtaaacgtaaaagcaactaaaaaagcaaatttataa

SEQ ID NO: 446 - protein, 148 aa, Haemophilus influenzae
MNLTKILPAFAAVVVLSACAKDAPEMTKSSAQIAEMQTLPTITDKTVVYSCNKQTVTAVYQFENQEPVAAMVSVGDGIIAKDFTRDKSQNDFTSFVSGDYVWNVDSGLTLDKFDSVVPVNLIQKGKSSDNIIVKNCDVNVKATKKANL

SEQ ID NO: 447 - DNA, 1092 bp, Haemophilus influenzae
  misc_feature 1069, 1070, 1071, 1072, 1073: n is any nucleotide
ttgagatcattttcaattcaaactagacttacccctattttatttaacctaaattttgttatgcgtgtttcagactttaactttgatttacccgatgaattaattgctcgttatcctaaaactgatcgtgtttcttgtcgtttattacagttaaatggcgaaaacggagaaatttttcaccgcactttttctgatgtattagatttaattgatgaaggcgatttgttgatttttaataatacgcgcgttattcctgcaagaatgtttgggcgtaaagccagtggtggcaaaattgaagttttagttgagagaatgttagatgaacatcgtttcttagcgcatattcgttcatcaaaatcacccaaagaaggggcggaattatttttaggtgaagataaattaggcgaaaataatggcattaaagcagtaatgaaagctcgtcatagctcgttgtttgaagtggaattaagtgataaatcaaccgctcttttagatgtgttgcaaaccattgggcatatgccattaccgccttatatcgatcgtccagatgaagaagccgataaagaatgttatcaaacggtttatagtaaagtaccaggtgcggtagcagcaccaacagcaggcttacattttgatgatcccttgcttgagaaacttaaaaagaaaggtgtgaattttgaatttgttacattacatgtaggcgcaggaacattccagcctgttcgtgtggaaaatattgaagatcacgtaatgcatgcggagtatgtggaagtttctcaagaagtctgtaatgcgattatcgcaacaaaaaaagcgggcaaacgtgtaattgcagtgggaactacttctgttcgttctattgaaagtgcggcactttctgcggaagaatttggtaatccagatttaattgagccttatttttctgatacctctatttttatttatcctggtaaaaaattccgagtggtggattgtttaattactaatttccacttacctgaaagcactttgattatgttagtttcagcttttgctggttataaaaataccatgaatgcgtataagcatnnnnncattccattcattaattaa

SEQ ID NO: 448 - protein, 363 aa, Haemophilus influenzae
  VARIANT 357, 358: Xaa is any amino acid
MRSFSIQTRLTPILFNLNFVMRVSDFNFDLPDELIARYPKTDRVSCRLLQLNGENGEIFHRTFSDVLDLIDEGDLLIFNNTRVIPARMFGRKASGGKIEVLVERMLDEHRFLAHIRSSKSPKEGAELFLGEDKLGENNGIKAVMKARHSSLFEVELSDKSTALLDVLQTIGHMPLPPYIDRPDEEADKECYQTVYSKVPGAVAAPTAGLHFDDPLLEKLKKKGVNFEFVTLHVGAGTFQPVRVENIEDHVMHAEYVEVSQEVCNAIIATKKAGKRVIAVGTTSVRSIESAALSAEEFGNPDLIEPYFSDTSIFIYPGKKFRVVDCLITNFHLPESTLIMLVSAFAGYKNTMNAYKHXXIPFIN

SEQ ID NO: 449 - DNA, 603 bp, Haemophilus influenzae
atgattatgcatagattagaaacagtccttttttcaaatggagaacgttttcctatattggttaatgttaaaactggtattcctgatttttattcaaccttatgggtaactgtagaactacgtaatcaatccgcagtaaacacaattagaaataagctgggaactatacagtgggtaatgaattgggaaaaacagaataatcttgttattagcgatctaattcataacaaagcactcttaacagaaaaccaattagaatctcttatccaacatatgagaataaatgtaaaaaagcgaaagaatgtaatcaatacaaaaaaaagtgtgttaatgaaaggtaggactcaatttattgatatttattctgccgtatctcttagtcatcaatataatagactaacaacgctttcagaatacatattatttctatctaaagtaattaatgtatctaatgaatatattgaaaaattgacgaaactaattacgttaattaaagagtcaagacctaaaaatcataaaacattatctatcaaaccagaaagtgaactacctgatggatttgtagatgagtttatgtctattgcgaactttttctatccctaa

SEQ ID NO: 450 - protein, 200 aa, Haemophilus influenzae
MIMHRLETVLFSNGERFPILVNVKTGIPDFYSTLWVTVELRNQSAVNTIRNKLGTIQWVMNWEKQNNLVISDLIHNKALLTENQLESLIQHMRINVKKRKNVINTKKSVLMKGRTQFIDIYSAVSLSHQYNRLTTLSEYILFLSKVINVSNEYIEKLTKLITLIKESRPKNHKTLSIKPESELPDGFVDEFMSIANFFYP

SEQ ID NO: 451 - DNA, 507 bp, Haemophilus influenzae
atggctggaattaataaagtcattattgtaggtcatttaggtaatgatcctgaaattcgtactatgccaaacggcgatgccgttgcaaatatcagcgtagcaaccagtgaaagctggaacgatcgtaatactggcgaacgccgtgaagtaacagaatggcaccgcattgtattctatcgtcgtcaagcagagatttgcggcgaatatttacgcaaaggctctcaagtgtatgtggagggtcgtttaaaaacgcgtaaatggcaagatcaaaacggccaagatcgttacaccacagaaattcaaggcgatgtaatgcaaatgcttggtggacgtaatcaaaacgcaggtggtttctctaatgagatgggatcttcaccacaaccttcttaccaagctcgtcaaactaataatggtggtaattatcaatcatctcgtccagcgccacaacaagctgcaccacaggctgaaccaccaatggatggatttgatgacgatattccgttctga

SEQ ID NO: 452 - protein, 168 aa, Haemophilus influenzae
MAGINKVIIVGHLGNDPEIRTMPNGDAVANISVATSESWNDRNTGERREVTEWHRIVFYRRQAEICGEYLRKGSQVYVEGRLKTRKWQDQNGQDRYTTEIQGDVMQMLGGRNQNAGGFSNEMGSSPQPSYQARQTNNGGNYQSSRPAPQQAAPQAEPPMDGFDDDIPF

SEQ ID NO: 453 - DNA, 2832 bp, Haemophilus influenzae
atggaaaatatcgatattcgcggggctagaacccataacctgaaaaatattaatttaactattccacgcaataaacttgtggtgattactgggctttcaggttcgggaaaatcctctttagcctttgatacactttatgcggaagggcaacgccgctatgttgaatctctttcggcgtatgcacgtcaatttttgtctttaatggaaaagcctgatgtggattctattgagggactttcccctgcaatttccattgaacaaaaatctacctcacacaatccacgttctacagtgggaacaattacggaaatttacgattatttacgtttattgtttgcacgagtaggggagccacgttgtccagatcataatgttccattaacggcacaaacaattagtcaaatggtggataaagtattaagtttgccagaagacagcaagatgatgttacttgcgccagttgtcaaaaatcgaaaaggcgaacatctcaagattttagaaaatattgctgcgcaaggttatattcgtgcgcgtattgatggcgagatttgcgatttatctgatccgccaaaattagccttacagaaaaaacatactattgaagtagtggttgatcgttttaaagtgcggtcagatttagcaacacgtttagccgaatcttttgaaaccgcattagagctttcaggtggcactgcaattgtggcagatatggataatctgaaagcagaagaattaattttttcggcaaattttgcttgtccgcattgtggttattctgtgccagaattagagcctcgtttattttcctttaacaatcctgcaggtgcttgcccaacttgtgatggcttgggtgtgcagcaatattttgatgaagatcgtgtggtgcaaaatccaactatttctcttgctggcggtgcagtaaaaggttgggatcgtcgtaatttctattattatcaaatgcttacatcattggcgaaacattatgattttgatgttgaagccccttatgaatctttgccaaagaagattcaacacatcattatgcatggctcaggtaaagaggaaattgaattccaatatatgaatgatcgtggcgatgtggttattcgcaagcatccttttgaagggattttgaataatatggctcgccgatataaagaaacggaatcaatgtcggtgcgtgaagaattagcgaaaaatattagcaatcgaccttgtatagattgtggcggttctcgtttgcgacccgaagcacgtaatgtgtatattggaaaaaccaatttgccgataattgcggaaaaaagcattggcgaaaccctcgaattttttaccgcactttctttaacaggtcaaaaagcacaaattgcggaaaaaattcttaaagaaatccgcgagcgtttgcagtttttagtgaatgtaggtttgaattatctttctctttctcgttcagctgaaactctttcaggtggggaagcgcaacgtattcgccttgcgagtcaaattggtgcgggacttgttggcgtaatgtatgtattagatgaaccctctattggcttgcaccaacgtgataatgaacgcttacttaatacgttaattcatttgcgtaatcttggtaatacggtaattgttgtggagcacgatgaagacgcgattcgtgcagctgaccatattattgatattgggcctggtgcgggcgtgcatggcggacaagttattgcgcaaggaaatgccgatgaaattatgctcaatccaaattccatcacgggaaaatttttatcgggcgcagataaaatcgaaatcccgaaaaaacgcaccgcacttgataagaaaaaatggctcaaacttaaaggcgcatcaggtaataacttaaaaaatgtgaatttagatattcccgttggtttgtttacttgcgtaactggtgtgtctggttcaggaaaatccacacttattaatgatactttatttccacttgcgcaaaatgcgttaaatagagcggaaaagacggattacgcaccttatcaatctatcgagggattagaacatttcgataaagttattgatattaaccaaagcccgattggacgcacgccacgttcaaatccagccacttatacaggcttatttaccccgattcgcgagctttttgcaggtgtgccagaggcgcgtgcgcgcggctataatcctggacgttttagctttaacgtacgaggtggacgctgtgaagcctgtcagggcgatggtgtactcaaagttgaaatgcattttttacccgatgtttatgttccttgcgaccaatgtaaaggtaaacgctataatcgcgaaaccttagaaattcgttataaaggcaaaacgattcatcaagttttagatatgacggtggaagaagctcgcgagttttttgatgcgattccaatgattgcaagaaaattacaaaccttgatagatgtgggattatcctatattcgattaggtcaatcttccacaacactttcaggcggcgaagcccagcgcgtgaaactagcaacggaactttctaaacgtgatacgggtaaaactttgtatattctagatgaaccgacgactggtttgcattttgctgacattaagcaattacttgaagtactgcatcgattacgcgaccaaggaaatactatcgtcgtcattgaacacaatcttgatgtgattaaaaccgcagactggattgtcgatcttggcccagagggaggcagtggcggcggacaaattattgcgacgggtacaccagagcaagttgccaaagtagaaagttcccacaccgcccgcttccttaaaccgattttagaaaaaccttag

SEQ ID NO: 454 - protein, 943 aa, Haemophilus influenzae
MENIDIRGARTHNLKNINLTIPRNKLVVITGLSGSGKSSLAFDTLYAEGQRRYVESLSAYARQFLSLMEKPDVDSIEGLSPAISIEQKSTSHNPRSTVGTITEIYDYLRLLFARVGEPRCPDHNVPLTAQTISQMVDKVLSLPEDSKMMLLAPVVKNRKGEHLKILENIAAQGYIRARIDGEICDLSDPPKLALQKKHTIEVVVDRFKVRSDLATRLAESFETALELSGGTAIVADMDNLKAEELIFSANFACPHCGYSVPELEPRLFSFNNPAGACPTCDGLGVQQYFDEDRVVQNPTISLAGGAVKGWDRRNFYYYQMLTSLAKHYDFDVEAPYESLPKKIQHIIMHGSGKEEIEFQYMNDRGDVVIRKHPFEGILNNMARRYKETESMSVREELAKNISNRPCIDCGGSRLRPEARNVYIGKTNLPIIAEKSIGETLEFFTALSLTGQKAQIAEKILKEIRERLQFLVNVGLNYLSLSRSAETLSGGEAQRIRLASQIGAGLVGVMYVLDEPSIGLHQRDNERLLNTLIHLRNLGNTVIVVEHDEDAIRAADHIIDIGPGAGVHGGQVIAQGNADEIMLNPNSITGKFLSGADKIEIPKKRTALDKKKWLKLKGASGNNLKNVNLDIPVGLFTCVTGVSGSGKSTLINDTLFPLAQNALNRAEKTDYAPYQSIEGLEHFDKVIDINQSPIGRTPRSNPATYTGLFTPIRELFAGVPEARARGYNPGRFSFNVRGGRCEACQGDGVLKVEMHFLPDVYVPCDQCKGKRYNRETLEIRYKGKTIHQVLDMTVEEAREFFDAIPMIARKLQTLIDVGLSYIRLGQSSTTLSGGEAQRVKLATELSKRDTGKTLYILDEPTTGLHFADIKQLLEVLHRLRDQGNTIVVIEHNLDVIKTADWIVDLGPEGGSGGGQIIATGTPEQVAKVESSHTARFLKPILEKP

SEQ ID NO: 455 - DNA, 4203 bp, Haemophilus influenzae
atgaaaaaaactgtatttcgtcttaattttttaaccgcttgtgtttcattagggatagtgtcgcaagcgtgggcaggtcatacttattttgggattgactaccaatattatcgtgattttgctgagaataaagggaagttttcagttggggctaaaaatattgaggtttataacaaagaagggcaattagttggcacatcaatgacaaaagcacctatgattgatttttccgtggtgtcgcgtaacggcgtggcggcattagtaggcgatcaatatatagtgagtgtggcacataacggtggatataatagcgttgattttggagcagaaggtccaaatcccgatcagcatcgttttacttatcaaattgtaaaaagaaataattatcaggcttgggagaaagagcatccttatgatggagattatcatatgcctcgtttacataaatttgtaactgaagctgaacctgtgggtatgacaacaaatatggatggaaaagtatatgctgatagagagaactatcctgagcgtgtacgtataggctcaggacgtcagtattggcgtacagataaagatgaagaaacgaatgtacatagttcatattatgtctcaggtgcatatcgttatcttactgcaggaaatacccatactcagagtggaaatggtaatggtacagtcaatcttagtggtaatgtagttagccctaatcattatggtccattaccaacgggtggttctaaaggcgatagcggttcgccaatgtttatttatgatgcgaagaagaaacaatggcttataaatgctgtattacaaactgggcatccttttttcggaagaggtaatgggtttcagttaatacgtgaagaatggttttataatgaagttcttgcggttgatgcccctagtgtttttcaacgctatattcccccaataaatggacattattcctttgtatcaaataatgatggtacaggtaaattaactttaactagacctagtaaagatggctctaaagcaaaatcagaagtaggaactgtgaagttatttaatccatcgttaaatcaaaccgctaaagaacgtgttaaagcagcagcaggctataatatttaccaaccaagaatggaatatggaaaaaatatttaccttggcgaccaaggaaaaggaactttaacaatcgaaaataatataaatcaaggtgctggtggattgtattttgaaggtgattttgtcgttaaaccaagtgataacaacgtaacttggcaaggtgcaggcatctctgttggagaagaaagtacagttgaatggcaagtgcataatccagaaggcgatcgcttatccaaaattgggctgggaaccttacttgttaatggtaaagggaaaaacttaggaagcctgagtgtcggtaacggtttggttgtgttagatcaacaagcagatgaatcaggtcaaaaacaagcctttaaagaagttgggatcgttagcgggagagcaacggttaaactgaatagcgaaaatcaagtggatccgaataacatttattttggtttccgtggtggtcgcttagatcttaatgggcattcattaacctttaaacgtatccaaaatacggacgagggggcgatgattgtgaaccataatacaactcaagtcgctaatattactattacaggttatgacaccataaatgataatttaaaacaattaactaataagcgagatattgcatttaacggttggtttggcgaaacagatgaaaataaacacaatggacgattaaaccttatttatcaacccactgcagaagatcgtactttgctactttcaggcggcacaaacttaaaaggcgatattacccaaacaaaaggtaaactatttttcagtggtagaccgacaccccacgcctacaatcatttagacaaacgttggtcagaaatggaaggtatcccacaaggcgaaattgtgtgggattacgattggatcaaccgcacatttaaagctgaaaacttccaaattaaaggcggaagtgcggtggtttctcgcaatgtttcttcaattgagggaaattggacagtcagcaataatgcaaatgccacatttggtgttgtgccaaatcagaaaaataccatttgcacgcgttcagattggacaggattaacgacttgtaaaacagtagatttgaacaataacgctgttattgcttctatacctataacacaaatcaatggctctattaatttaactgataatgcaacagcgaatattcatggtttagcaaaacttaatggcaatgtcactttaataaatcacagccaatttacattgagtaacaatgccacccaaataggcaatatcaaactttcaaatcacgcaaatgcaacggtaaataatgccactttaatgggcaatgtgaatttaacggattctgctcaattttatttaaaaaacagccatttttcgcaccaaattcagggcgacaaagacacaacagtgacgttggaaaatgcgacttggacaatgcctagcgatactacattgcagaatttaacgctaaataatagtactgttacgttaaattcagcttattcagctagctcaaataatgcaccacgtcaccgccgttcattagagacggaaacaacgccaacatcggcagaacatcgtttcaacacattgacagtaaatggtaaattgagggggaaaggcacattccaatttacttcatctttatttggctataaaagcgataaattaaaattatccaatgacgctgagggcgattacacattatctgttcgcaacacaggcaaagaacccgaagcccttgagcaattaactttggttgaaagcaaagataataaaccgttatcagacaaactcaaatttactttagaaaatgaccacgttgatgcaggagcattacgttatgaattagtgaagaataatggcgaattccgcttgcataacccaataaaagagcaggaattgcacaatgatttagtaagagcagagcaagcagaacgaacattagaagccaaacaagttgaacagactgctgaaacacaaacaagtcaggcaagagtgcggtcaagaagagcggtgttttctgataccccgtctgctcaaagcctgttaaacgcattagaagccaaacaagctctgactgctgaaaaacaaaaaagtaaggcaaaaacaaaaaaagcgcggtcaaaaagagcgttgttttttgataccccgcctgatcaaagacagttagacgtattaaaagccgcacttgaggttattaatgcccaaccgcaagtgggaaaagaacgtcaagctcaagagaaacaacgcaaacaaaaagaattgatcagccgttactcaaatagtgcgttatcggagttgtctgcgacagtaaatagtatgctttccgttcaagatgaattggatcgtctttttgtagatcaagcacaatctgccctgtggacaaatatcgcacaggataaaagacgctatgattctgatgcgttccgtgcttatcagcagaaaacgaacttgcgtcaaattggggtgcaaaaagccttagataatggacgaattggggcggttttctcgcatagccgttcagataatacctttgacgaacaggttaaaaatcacgcgacattaacgatgatgtcgggttttgcccaatatcaatggggcgatttacaatttggtgtaaacgtgggcgcgggaattagtgcgagtaaaatggctggagaacacagccgaaaaattcatcgaaaagcgataaattatggtgtgaatgcaagttatcagttccgtttagggcaattgggtattcagccttatttgggtgttaatcgatattttattgaacgtgaaaattatcaatctgaagaagtgaaagtgcaaacaccgagccttgcatttaatcgctataatgctggcattcgagttgattatacatttaccccgacagataatatcagcgttaagccttatttcttcgtcaattatgttgatgtttcaaacgctaacgtacaaaccactgtaaatcgcacgatgttgcaacaatcatttgggcgttattggcaaaaagaagtgggattaaaggcagaaattttacatttccaactttccgcttttatctcaaaatctcaaggttcacaactcggcaaacagcaaaatgtgggcgtgaaattggggtatcgttggtaa

SEQ ID NO: 456 - protein, 1400 aa, Haemophilus influenzae
MKKTVFRLNFLTACVSLGIVSQAWAGHTYFGIDYQYYRDFAENKGKFSVGAKNIEVYNKEGQLVGTSMTKAPMIDFSVVSRNGVAALVGDQYIVSVAHNGGYNSVDFGAEGPNPDQHRFTYQIVKRNNYQAWEKEHPYDGDYHMPRLHKFVTEAEPVGMTTNMDGKVYADRENYPERVRIGSGRQYWRTDKDEETNVHSSYYVSGAYRYLTAGNTHTQSGNGNGTVNLSGNVVSPNHYGPLPTGGSKGDSGSPMFIYDAKKKQWLINAVLQTGHPFFGRGNGFQLIREEWFYNEVLAVDAPSVFQRYIPPINGHYSFVSNNDGTGKLTLTRPSKDGSKAKSEVGTVKLFNPSLNQTAKERVKAAAGYNIYQPRMEYGKNIYLGDQGKGTLTIENNINQGAGGLYFEGDFVVKPSDNNVTWQGAGISVGEESTVEWQVHNPEGDRLSKIGLGTLLVNGKGKNLGSLSVGNGLVVLDQQADESGQKQAFKEVGIVSGRATVKLNSENQVDPNNIYFGFRGGRLDLNGHSLTFKRIQNTDEGAMIVNHNTTQVANITITGYDTINDNLKQLTNKRDIAFNGWFGETDENKHNGRLNLIYQPTAEDRTLLLSGGTNLKGDITQTKGKLFFSGRPTPHAYNHLDKRWSEMEGIPQGEIVWDYDWINRTFKAENFQIKGGSAVVSRNVSSIEGNWTVSNNANATFGVVPNQKNTICTRSDWTGLTTCKTVDLNNNAVIASIPITQINGSINLTDNATANIHGLAKLNGNVTLINHSQFTLSNNATQIGNIKLSNHANATVNNATLMGNVNLTDSAQFYLKNSHFSHQIQGDKDTTVTLENATWTMPSDTTLQNLTLNNSTVTLNSAYSASSNNAPRHRRSLETETTPTSAEHRFNTLTVNGKLRGKGTFQFTSSLFGYKSDKLKLSNDAEGDYTLSVRNTGKEPEALEQLTLVESKDNKPLSDKLKFTLENDHVDAGALRYELVKNNGEFRLHNPIKEQELHNDLVRAEQAERTLEAKQVEQTAETQTSQARVRSRRAVFSDTPSAQSLLNALEAKQALTAEKQKSKAKTKKARSKRALFFDTPPDQRQLDVLKAALEVINAQPQVGKERQAQEKQRKQKELISRYSNSALSELSATVNSMLSVQDELDRLFVDQAQSALWTNIAQDKRRYDSDAFRAYQQKTNLRQIGVQKALDNGRIGAVFSHSRSDNTFDEQVKNHATLTMMSGFAQYQWGDLQFGVNVGAGISASKMAGEHSRKIHRKAINYGVNASYQFRLGQLGIQPYLGVNRYFIERENYQSEEVKVQTPSLAFNRYNAGIRVDYTFTPTDNISVKPYFFVNYVDVSNANVQTTVNRTMLQQSFGRYWQKEVGLKAEILHFQLSAFISKSQGSQLGKQQNVGVKLGYRW

SEQ ID NO: 457 - DNA, 420 bp, Haemophilus influenzae
ttgaaagaaaaagggttagtaaatacacgtgtcaatggtattcaagtcgaagtagttgcgcttgaacttggtaagcagattattgctaatcaaattgagcatgaaattgttacaagccaagagagttcgcctatgccaatggcaaaagatgcatcacaattcgttattgaagatgatgtgcctatgcctaaaattaaacgtaatcgcacgaaaaaaactattgcgtatcctttagagcagatgcaagtaggacaatctttctttgtgcctgcaggggcaaagactaaagacttgactaaactttatcgtaatgtttcagttctcgtctctcaagctaaacgcaatcttggtttagatattaaattcagaatagccgtcgattttgaatgtaacggtgttcgtgtatggcgtagacagtaa

SEQ ID NO: 458 - protein, 139 aa, Haemophilus influenzae
MKEKGLVNTRVNGIQVEVVALELGKQIIANQIEHEIVTSQESSPMPMAKDASQFVIEDDVPMPKIKRNRTKKTIAYPLEQMQVGQSFFVPAGAKTKDLTKLYRNVSVLVSQAKRNLGLDIKFRIAVDFECNGVRVWRRQ

SEQ ID NO: 459 - DNA, 468 bp, Haemophilus influenzae
atgattattagcagtttaaccagcccaaattttaaagttggtttaccaaaagtgattgctgaagtatgtgattatttaaatacgttagatttgaatgcgttagaaaatggtcgccatgatattaacgatcaaatttatatgaacgtaatggaaccagaaactgcagaaccaagcagtaaaaaagcagaattacatcatgaatacttagatgtgcaagtgcttattcgtggcacggaaaatatcgaagtgggcgcaacctatccgaatttatctaagtatgaagattacaacgaagcggatgattatcaactttgtgcagatattgatgataaattcaccgtcacaatgaaaccaaaaatgttcgctgtattctatccttatgaaccgcacaagccttgctgtgtagtgaatggaaaaacagaaaaaattaaaaaattagtcgtaaaagtacctgttaaattaatttga

SEQ ID NO: 460 - protein, 155 aa, Haemophilus influenzae
MIISSLTSPNFKVGLPKVIAEVCDYLNTLDLNALENGRHDINDQIYMNVMEPETAEPSSKKAELHHEYLDVQVLIRGTENIEVGATYPNLSKYEDYNEADDYQLCADIDDKFTVTMKPKMFAVFYPYEPHKPCCVVNGKTEKIKKLVVKVPVKLI

SEQ ID NO: 461 - DNA, 372 bp, Haemophilus influenzae
atgctaattatcttccttaatgtagaaattacactgaaatctttattaatgcacaatgaaaatctctctgtttttattttacatacaggagatatttctgaatcgtggcaaaatgatcttcaactttattttgctaaacgctattcaacattacaattagttcatatgatttcaattaatagtcttgatatttctcctgttatttttcattttacaggtcctcataagcctcttgataatattttttctgaaaatacttgtgttaatgccgtaatttcattgtttagactttatgcgtcaataagttggcaaaatatttgctctcttccactcggcactataagagctaattggattaatcaagagagatga

SEQ ID NO: 462 - protein, 123 aa, Haemophilus influenzae
MLIIFLNVEITLKSLLMHNENLSVFILHTGDISESWQNDLQLYFAKRYSTLQLVHMISINSLDISPVIFHFTGPHKPLDNIFSENTCVNAVISLFRLYASISWQNICSLPLGTIRANWINQER

SEQ ID NO: 463 - DNA, 2130 bp, Haemophilus influenzae
gtgaatccaattgttaaacaatttaaatacggtcagcataccgttactctagaaactggcgcgattgcacgtcaagcaacggctgcggttatggtaagcatggacgataccacggtattcgtgactgttgttgctaaaaaagatgtgaaagaaggtcaagacttcttcccattaaccgtaaactatcaagagcgtacttatgcggcgggtaaaatccctggtggtttcttcaagcgtgaaggtcgtccatctgaaggcgaaactttaattgcacgtttaatcgaccgtccaattcgtccattattcccagaaggtttcttcaatgaaatccaagttgtggcaactgtggtttctgtaaacccacaaatcagcccagacttagtggcaatgatcggtgcttctgcagcattaaccttatctggtgtgcctttcaacggccctatcggtgcagcgcgtgttggttttatcgacaaccaattcgtattaaacccaactatggcagaacaaaaacaaagccgtttggacttagtggttgccggtactgacaaagccgtattaatggttgaatctgaagctgatattttaactgaagaacaaatgttagcggcagtcgtattcggtcatcaacaacaacaagttgtgattgaagcaatcaaagaatttgcaaaagaagcgggcaaaccacgttgggattgggttgcaccacaaccaaacacagatttaatcaacaaagtaaaagcgattgctgaagcacgtttaggcgatgcataccgcattactgaaaaacaattacgttacgaacaaatcgatgcgattaaagcggatgtaattgcgcaaatcacagctgaagatgaagaaatcagcgaaggtaaaatcgtggatattttcaccgcacttgaaagccaaatcgttcgtggccgtatcattgcaggcgaaccacgtattgatggtcgtaccgttgatactgttcgtgcattagatatttgcactggtgtattaccacgtactcacggttctgcaattttcacccgtggcgaaacgcaagcattagctgttgcaaccttaggtaccgaacgtgatgcacaaatcattgatgaattaacgggtgaacgtcaagatcacttcttattccattataatttccctccatattctgtaggcgaaacaggtatgatcggctcgccaaaacgtcgtgagatcggtcacggtcgtttagcaaaacgtggtgtagcggctgttatgccaagccttgcagaattcccgtatgttgtgcgtgtagtatctgaaatcactgaatctaacggttcttcttctatggcctctgtatgtggtgcatctttagcattaatggatgcaggtgttccaatcaaagctgcggttgcaggtatcgcaatgggtttagtgaaagaagaagagaaatttgtggtgctttcagatattttaggcgatgaagaccatttaggcgatatggactttaaagtagcgggtacacgcgaaggtgtcaccgcacttcaaatggacatcaaaattgaaggtatcacccctgaaattatgcaaattgcattaaaccaagcgaaaagtgcacgtatgcacattcttggtgtaatggaacaagcaatccctgctccacgtgcggatatttctgactacgcaccgcgcatctatacaatgaaaatcgatcctaagaaaatcaaagatgtgattggtaaaggtggtgcaacaatccgttcactaactgaagaaactggtacatcaattgatattgatgacgatggtacagtgaaaattgccgcagtagatagcaatgcagcgaaaaacgtaatgggacgtattgaggaaatcgttgcagaagttgaagctggcgcaatttacaaaggtaaagtcactcgtcttgctgattttggtgcattcgtcgcaatcgttggaaataaagaaggtttggttcatatttctcaaattgctgaagagcgtgtagaaaaagttagcgattaccttcaagtgggtcaagaagtaaacgtaaaagttgttgaaatcgatcgtcaaggtcgtattcgtttaacaatgaaagacttggctccaaaacaagaaactgaaattaaccaagaagatcctgtcgaagaacaggaataa

SEQ ID NO: 464 - protein, 709 aa, Haemophilus influenzae
MNPIVKQFKYGQHTVTLETGAIARQATAAVMVSMDDTTVFVTVVAKKDVKEGQDFFPLTVNYQERTYAAGKIPGGFFKREGRPSEGETLIARLIDRPIRPLFPEGFFNEIQVVATVVSVNPQISPDLVAMIGASAALTLSGVPFNGPIGAARVGFIDNQFVLNPTMAEQKQSRLDLVVAGTDKAVLMVESEADILTEEQMLAAVVFGHQQQQVVIEAIKEFAKEAGKPRWDWVAPQPNTDLINKVKAIAEARLGDAYRITEKQLRYEQIDAIKADVIAQITAEDEEISEGKIVDIFTALESQIVRGRIIAGEPRIDGRTVDTVRALDICTGVLPRTHGSAIFTRGETQALAVATLGTERDAQIIDELTGERQDHFLFHYNFPPYSVGETGMIGSPKRREIGHGRLAKRGVAAVMPSLAEFPYVVRVVSEITESNGSSSMASVCGASLALMDAGVPIKAAVAGIAMGLVKEEEKFVVLSDILGDEDHLGDMDFKVAGTREGVTALQMDIKIEGITPEIMQIALNQAKSARMHILGVMEQAIPAPRADISDYAPRIYTMKIDPKKIKDVIGKGGATIRSLTEETGTSIDIDDDGTVKIAAVDSNAAKNVMGRIEEIVAEVEAGAIYKGKVTRLADFGAFVAIVGNKEGLVHISQIAEERVEKVSDYLQVGQEVNVKVVEIDRQGRIRLTMKDLAPKQETEINQEDPVEEQE

SEQ ID NO: 465 - DNA, 945 bp, Haemophilus influenzae
atgcggtgttttcgcttatctcgccattttatagtctatttatttagcttatgtgcgatcttactccttgctggctgtgttcagtctaggggcggttttgtgtctaaaaatcatgtcgtgttggctgaacaaaacccgaatactcactttgaacaagaagtgatgatcgtgcgattaagccaagtactactggttggaaaaatgagtaatgaagaacgtgcatcgctacattttgaacgtggcgtactctatgattctcttggattatggggacttgctcgttatgatcttactcaagcccttgcattacagccgaaaatggcatctgtgtacaattacttagggctttatttattgcttgaagaagattacgacggcgcattggatgctttcaatacggtgtttgaattagattcaggttatgactatacccaccttaatcgtggtttaaatttttattatgtagggcgctaccatcttgctcagcaagatttcttacagttctaccaagccgataaaaaagatccctatcgtgtcttatggctatatttgaacgaacaaaaattaaaaccacaagaagcccaaacaaaccttgttgaacgagcaaaagggctatcagaggacttctggggtacacacatcgttcaatattacttaggacacatctctgtagaagaattgcaacaacgtgcaagtgaatttgccgaaaattcacaacaatatgctgaaattctcacagaaacctatttttatctagcaaaacaaaaactcaatgtagggctagtagatgaagcagcagctttatttaaactagctatggcaaatcaggtttataactttgttgagtatcgttttgccgcgtttgaactcatgaaattaaaaccggttcaaacagaagacgaaaaagaagagaaaagtgcggtaacaaaagcgattgttttctaa

SEQ ID NO: 466 - protein, 314 aa, Haemophilus influenzae
MRCFRLSRHFIVYLFSLCAILLLAGCVQSRGGFVSKNHVVLAEQNPNTHFEQEVMIVRLSQVLLVGKMSNEERASLHFERGVLYDSLGLWGLARYDLTQALALQPKMASVYNYLGLYLLLEEDYDGALDAFNTVFELDSGYDYTHLNRGLNFYYVGRYHLAQQDFLQFYQADKKDPYRVLWLYLNEQKLKPQEAQTNLVERAKGLSEDFWGTHIVQYYLGHISVEELQQRASEFAENSQQYAEILTETYFYLAKQKLNVGLVDEAAALFKLAMANQVYNFVEYRFAAFELMKLKPVQTEDEKEEKSAVTKAIVF

SEQ ID NO: 467 - DNA, 1875 bp, Haemophilus influenzae
ttgagctttccttatttatattcgagtattttaatgactgacaaaattacttttaatgacttaggcttacctgagttcatcttaaaagctgtttctgacttaggttttgaaacaccttctccaattcaacaatcttgtattccgcatttgctcagtggcaatgatgtgctaggtatggcacaaacgggtagtggtaaaactgctgcctttgcactgcctttactcgcgcaaatcgatccaagtgaaaaacatccacaaatgttagtgatggcacctacacgcgaacttgctattcaagttgccgatgcgtgcgaacaatttgttaaatatgcacagggcactcgcattgttaccttatatggtggccaacgttatgacatccaacttcgtgcattaaaacaaggcgcacaagtgattgtgggtacaccaggccgtattcttgaccatattcgtcgcggaacattaaatctttctgaacttcgttttatcgtattagatgaagccgatgaaatgctacgtatgggtttcattgatgatgtagaaaccgtcatggcagaattaccagaaaatcatcaaactgcgttattctctgcaacaatgcctgaaccgatccgtcgtattacgaaacgttttatgaatgatccacaagaagtgaagatcaaagtgaataacgaaaatgccccagatatcgaccaaagttgttggtatgtacacggcgtgcgtaaaaacgaagctcttcttcgtttcttagaagtggaagattttgatgcagcgattatttttgctcgtactaaaactggcacgttagacattacagaactacttgaaaaaaatggtttccgttctgccgcacttaatggcgatatgacacaacaactccgcgaacaaaccctcgatcgcttacgtaacggcagtttagatattgttgtggcaaccgatgtggctgcacgcggtattgatattgaacgtatcagccttgtggtgaactacgacattccgcttgatgcagaatcttatgtacaccgaattggacgtactggtcgtgctggtcgttctggtcgtgctttattattcgttgagcctcgcgagcgtcgtttacttcgtaatattgaacacctaatgaaaaaaggtatcaatgaagtagaattgccaaatcatcttgtgttacaagaatgccgccgcaaaaaatttgtcgccaaaattacgaaacaactcgagcatcacgatttagagcaatatcgtagtttattagaagacttattcacagccgatcaggatcaagaagatattgctgcagcaatgttgatgctgcttcaaggtaaacaaaaattaattcttccacctgatccgccaatggagaaacgtcgtcgtgaacgtaatgaacgaggcgatcgccgtgaaaatccacgttcagctgaacgtcgtggcgaacgtaaaggctatggaaatccacaaccaatggatttatatcgtatcgaagtcggtcgtgcagatggtgtagaagttcgccatatcgttggtgcgattgctaacgaaggcgatattaacagccgttatattggccatattaaactttatgatgactacactaccgttgaattgccacaaggtatgccgaaagaattattgcaacaattcggaaaaacacgcgtattgaataaacaaatgcaaatgtctttcttaggtgcagtaaaatccgataattcccgtggcagcgatgattttaacggtaaacgtaaaggtcgtggtggcgatttccgtggagagcgcggacgtgaacgcggcaatgataatcgtggaaatcgtaaatttaatgaaaaaagtaaccgcacttttagcgacaaaccacgccgtgatcgtagatcatcattctaa

SEQ ID NO: 468 - protein, 624 aa, Haemophilus influenzae
MSFPYLYSSILMTDKITFNDLGLPEFILKAVSDLGFETPSPIQQSCIPHLLSGNDVLGMAQTGSGKTAAFALPLLAQIDPSEKHPQMLVMAPTRELAIQVADACEQFVKYAQGTRIVTLYGGQRYDIQLRALKQGAQVIVGTPGRILDHIRRGTLNLSELRFIVLDEADEMLRMGFIDDVETVMAELPENHQTALFSATMPEPIRRITKRFMNDPQEVKIKVNNENAPDIDQSCWYVHGVRKNEALLRFLEVEDFDAAIIFARTKTGTLDITELLEKNGFRSAALNGDMTQQLREQTLDRLRNGSLDIVVATDVAARGIDIERISLVVNYDIPLDAESYVHRIGRTGRAGRSGRALLFVEPRERRLLRNIEHLMKKGINEVELPNHLVLQECRRKKFVAKITKQLEHHDLEQYRSLLEDLFTADQDQEDIAAAMLMLLQGKQKLILPPDPPMEKRRRERNERGDRRENPRSAERRGERKGYGNPQPMDLYRIEVGRADGVEVRHIVGAIANEGDINSRYIGHIKLYDDYTTVELPQGMPKELLQQFGKTRVLNKQMQMSFLGAVKSDNSRGSDDFNGKRKGRGGDFRGERGRERGNDNRGNRKFNEKSNRTFSDKPRRDRRSSF

SEQ ID NO: 469 - DNA, 297 bp, Haemophilus influenzae
atgtcaaaacagcctcaaattctacttaataatacgtggaatgtgcgtattagtgatcccggagaggagggggcaaaaagccatttctttgaaacgatttatttaactctaacagcttattttgaagaaaataacatacgctatgaatttgtgcgtaaagtggaggatcaaataaaaatgcagcgttcttttacagagttaaatgaattgttcaaatttttaggggattattttgatcccgtctcgattggtctagtcggtgtgaaaattggaaacttagggataaaatcagaataa

SEQ ID NO: 470 - protein, 98 aa, Haemophilus influenzae
MSKQPQILLNNTWNVRISDPGEEGAKSHFFETIYLTLTAYFEENNIRYEFVRKVEDQIKMQRSFTELNELFKFLGDYFDPVSIGLVGVKIGNLGIKSE

SEQ ID NO: 471 - DNA, 246 bp, Haemophilus influenzae
atgagaaagaaacaaaaaagtgcggttgaaaatgaaaccgtttatttgcacactcgaggcgtgataaaagataatgcagtgatggcattgctaggcgataaattatttcgtcagcgtgttgagaaaaaacgtaaagggaaaggtagttaccaacgtaaggcgaaacacccagggaaaatatttgaaaagcccgattataaattttttgattacagaaactttataatcgggtttttcttaggttaa

SEQ ID NO: 472 - protein, 81 aa, Haemophilus influenzae
MRKKQKSAVENETVYLHTRGVIKDNAVMALLGDKLFRQRVEKKRKGKGSYQRKAKHPGKIFEKPDYKFFDYRNFIIGFFLG

SEQ ID NO: 473 - DNA, 351 bp, Haemophilus influenzae
atgtctgttattatttatcacaacccacattgctcaaaaagccgtgaaacgctagcattattagaaaataaaggtattcagccgattattgaactgtatttgcaaaagcagtattccgttaatgaattacaaagcattgccaaaaaattgggaattgatgatgttcgccaaatgatgcgcacgaaagatgaactatataaaagcttaaatttagataatttagatctttctcaagcagaattatttaaagcgataagtgaacattcagcacttattgaacgcccaattgttattaatggcgataaagctaaaatcgggcgtccgccagaaactgtacttgagattttgtaa

SEQ ID NO: 474 - protein, 116 aa, Haemophilus influenzae
MSVIIYHNPHCSKSRETLALLENKGIQPIIELYLQKQYSVNELQSIAKKLGIDDVRQMMRTKDELYKSLNLDNLDLSQAELFKAISEHSALIERPIVINGDKAKIGRPPETVLEIL

SEQ ID NO: 475 - DNA, 1050 bp, Haemophilus influenzae
atgctagaaatgttaaaaagctggtactcacgccgtttaagtgatccacaagcgatgggattattagctatattattatttggctttatctccatttatttttttggagatttaattgcacctttgttgattgctctagtgctatcctatttacttgaaataccaatcaattttttaaatcaatatttaaaatgcccaagaatgttagcgacaattcttattttcggtagttttattggtctagcagcagttttctttttggtattggtgccaatgttgtggaatcaaactatttccttattaagtgatttacccgctatgtttaataaatctaatgaatggctactcaatttacctaaaaattatcctgaacttattgattattcaatggttgattctattttcaattctgtgcgagaaaaaatccttggttttggcgaatctgctgtaaaactttctttagcctctattatgaacttggtttctttagggatttatgcctttttagtgccattaatgatgttttttatgttgaaggataaatcagaacttttacaaggcgttagccgtttcttaccgaaaaatagaaacttagctttcaaagtatggaaagaaatgcaacaacaaatttctaattacattcacggaaaattattagaaatactgattgtcactttaatcacttatattattttcttaattttcgggctaaattatccactcttattggcttttgcggtgggtctttcagttctcgtcccttatattggtgcagttattgtcacgattcctgttgcattggttgctttattccagtttggaatcagcccaacattttggtacatcattattgcttttgctgtaagccaacttttagatggaaatctccttgtgccttatttattttctgaagccgtcaatttacatccactaattattatcatttcagtattaatttttggcggtttatggggattttggggtgtattctttgccattcctttagccaccttagtaaaggccgtaataaatgccttacctcaagattaa

SEQ ID NO: 476 - protein, 349 aa, Haemophilus influenzae
MLEMLKSWYSRRLSDPQAMGLLAILLFGFISIYFFGDLIAPLLIALVLSYLLEIPINFLNQYLKCPRMLATILIFGSFIGLAAVFFLVLVPMLWNQTISLLSDLPAMFNKSNEWLLNLPKNYPELIDYSMVDSIFNSVREKILGFGESAVKLSLASIMNLVSLGIYAFLVPLMMFFMLKDKSELLQGVSRFLPKNRNLAFKVWKEMQQQISNYIHGKLLEILIVTLITYIIFLIFGLNYPLLLAFAVGLSVLVPYIGAVIVTIPVALVALFQFGISPTFWYIIIAFAVSQLLDGNLLVPYLFSEAVNLHPLIIIISVLIFGGLWGFWGVFFAIPLATLVKAVINALPQD

SEQ ID NO: 477 - DNA, 975 bp, Haemophilus influenzae
atgaaactttttacaaaagataaagacggacattttatccgtgaaatcaatgggataaagctcccgttcccattgactgaatttatgaaagtgcgtaaatggggttatatattatccgcacttttaatggtaatttctctattttttattattaccaaaggatttaactggggcttagattttactggcggagtggtatttgatactcacttctcgcagtccgctaaccttgaacaaattcgtagtaaacttcacgaaaatggaattgaaagtccagttgttcaaaccacaggatcggttcaggatgtgatgattcgtttacctgcaagtaataatgattctaccattggtgaacacgtcaaaagtatgctacagaatgtagataaagacattcaaattcgcagtattgagttcgttggcccaaatgttggtgaagaattagcacaaggtgcggtatatgcgactttagcgacattagcaatggtgcttatttatgtggggtcacgttttgaatggcgtttaggctttggcagtatcgcttctcttgcgcacgacgtcattattacgctaggggtattctctgcattacaaattgaaattgatcttacttttgtcgcagcgattttatctgtggtgggttactccatcaacgatagtattgtggtatttgaccgggttcgtgaaaatttccgaaaaattagacgattggatacgattgatattattgatatttctttaacgcaaactttatcaagaactatcattacttcggttactacattagttgtcgtgatggcattgttcttctttggtggtccttccattcataacttttcacttgctttactcgtaggtattggatttggtacttattcctcaatttttgttgccatcgccattgcatacgatgttggtttacgtcgtgaacatatgatcccacctaaagtagataaagaaattgatgaattaccttag

SEQ ID NO: 478 - protein, 324 aa, Haemophilus influenzae
MKLFTKDKDGHFIREINGIKLPFPLTEFMKVRKWGYILSALLMVISLFFIITKGFNWGLDFTGGVVFDTHFSQSANLEQIRSKLHENGIESPVVQTTGSVQDVMIRLPASNNDSTIGEHVKSMLQNVDKDIQIRSIEFVGPNVGEELAQGAVYATLATLAMVLIYVGSRFEWRLGFGSIASLAHDVIITLGVFSALQIEIDLTFVAAILSVVGYSINDSIVVFDRVRENFRKIRRLDTIDIIDISLTQTLSRTIITSVTTLVVVMALFFFGGPSIHNFSLALLVGIGFGTYSSIFVAIAIAYDVGLRREHMIPPKVDKEIDELP

SEQ ID NO: 479 - DNA, 1851 bp, Haemophilus influenzae
atgttaaaccgttatccattatggaagaatttgatggttatttttattgtggccatcgggattttatattctcttccaaatatttatggtgaagatcctgcggtgcaaatttccggtacacgcggtcaagaagcgaatactagcgtgcttggacaagttcaagatgtgcttaaaactaataatcttccaaccaaatctatcgtgcttgagaatggctcaattctagctcgttttactaataccgatgatcaacttcttgctaaagataaaattgctgaacgtcttggtaataattacaccaccgcattaaatcttgctccagccactccagcttggttaagtatgtttggtgcgaatcctatgaaatggggattagacttacgcggtggagttcgttttttgatggaagtcgatatgaatgccgcacttgtaaaacgccaagagcaattacaagatagtttgcgtggcgaacttcgtaaagaaaaaattcaatatactgccattaaaaatactgagcattttggtacgttgataaccttagctaatgtgagccagcgtgctaaagctgagcgaattattcgccaattacatccaacattagacattactgagcctgatgctgatagtattaatttagggctatctactgcagcattaaatgaagcacgcgacttagccattgagcaaaacttaacgattttacgtaaacgtgttgctgaattaggtgttgcagaagcggtaattcaacgtcaaggtgcggagcgtattgtgattgaattaccaggtgttcaagacactgcacgggcaaaagaaattttaggggcaacggcaacacttgagtttcgtatcgtaaatcaaaatgttacggctgatgctatttctcgtaatatgttaccagctgattcggaagttaaatatgatcgccaaggtcatcctgttgcgctatttaaacgtgccgtattaggtggggagcatattattaattcaagctctggtttagatcagcattcaagcacgccgcaagtgagtgtaaccttggatagcgaaggtggcgagattatgtctcagaccactaaaaaatattacaagaaaccaatggcaacgctttatgttgaatataaagataacggtaaaaaagatgaaaatggtaaaactattttagaaaagcatgaagaagtcattaatgttgcaacaattcaaggacgttttggttctaatttccaaattactggtgttgatagtattgccgaagcacataatctttctaccttattgaaatctggtgcattaattgcaccaattcaaattgttgaagaacgtacaattggcccatcattaggtgcgcaaaacgtagagcaagggattaatgcgagtctttggggattagttgctgttattgcctttatgttgttttactacaaaatgtttggtgtgattgcaagttttgcacttgttattaatatcgtattacttgtgggattaatgtctattttacccggcgcgacactttcaatgccgggtattgcgggtatcgttttaactttaggtatgtcagtagatgcgaatgtattgatttttgaacgtattaaagaagaaattcgtaatggtcgttcaattcagcaagccattaatgaaggttataacggcgcatttacttctatttttgatgcaaacttaaccacaatcttaactgcaattattctatatgcggtaggaacaggcccaattcaaggttttgcgattacgctttcacttggtgttgcgatttctatgtttaccgcgattactggaactcgcgcattagttaatgccctttacggcggcaaacaacttaaaaaattattaatttag

SEQ ID NO: 480 - protein, 616 aa, Haemophilus influenzae
MLNRYPLWKNLMVIFIVAIGILYSLPNIYGEDPAVQISGTRGQEANTSVLGQVQDVLKTNNLPTKSIVLENGSILARFTNTDDQLLAKDKIAERLGNNYTTALNLAPATPAWLSMFGANPMKWGLDLRGGVRFLMEVDMNAALVKRQEQLQDSLRGELRKEKIQYTAIKNTEHFGTLITLANVSQRAKAERIIRQLHPTLDITEPDADSINLGLSTAALNEARDLAIEQNLTILRKRVAELGVAEAVIQRQGAERIVIELPGVQDTARAKEILGATATLEFRIVNQNVTADAISRNMLPADSEVKYDRQGHPVALFKRAVLGGEHIINSSSGLDQHSSTPQVSVTLDSEGGEIMSQTTKKYYKKPMATLYVEYKDNGKKDENGKTILEKHEEVINVATIQGRFGSNFQITGVDSIAEAHNLSTLLKSGALIAPIQIVEERTIGPSLGAQNVEQGINASLWGLVAVIAFMLFYYKMFGVIASFALVINIVLLVGLMSILPGATLSMPGIAGIVLTLGMSVDANVLIFERIKEEIRNGRSIQQAINEGYNGAFTSIFDANLTTILTAIILYAVGTGPIQGFAITLSLGVAISMFTAITGTRALVNALYGGKQLKKLLI

SEQ ID NO: 481 - DNA, 294 bp, Haemophilus influenzae
atggaagcacaaagtccaatgtccacgctatttattttcgtgatctttggtttaattttctactttatgatttatcgcccacaagctaaacgcaataaagaacataaaaaattgatgtctgagcttgcaaaaggtactgaagttttaaccgctggtggtttaatcggcaaaattactaaagtaaccgaaggtagcgatagcatcgtgattgcgttaaacgacacgacagaaattacgattaatcgtaactacattgtgagcgttcttcctaaaggttcattaaaatcactttaa

SEQ ID NO: 482 - protein, 97 aa, Haemophilus influenzae
MEAQSPMSTLFIFVIFGLIFYFMIYRPQAKRNKEHKKLMSELAKGTEVLTAGGLIGKITKVTEGSDSIVIALNDTTEITINRNYIVSVLPKGSLKSL

SEQ ID NO: 483 - DNA, 222 bp, Haemophilus influenzae
atgaaatatcagctcaatttaaccgcacttcgatgccccattcctcttttaagtgctaaaaaagccttaaaaaatttgaataaaaatgatgaactaatgttgatcttaaaccttgaaagtgcggtggaaaatttttctatttttgccgaagaaaattctgttgctttggtcgagcaatattacgcttcggaaaaagaatttatcgttatcttgaaaaaataa

SEQ ID NO: 484 - protein, 73 aa, Haemophilus influenzae
MKYQLNLTALRCPIPLLSAKKALKNLNKNDELMLILNLESAVENFSIFAEENSVALVEQYYASEKEFIVILKK

SEQ ID NO: 485 - DNA, 519 bp, Haemophilus influenzae
atgcaaattcttgaacctcaacaattcgccacttggaatgaacctattgaaatgctttatgcctgccatagcaaggtaaaacgtttttgtcgtcagttaagcattttgcctgattatctagaaaaacacggctatactcaggcggtattaaatgatgttgggcagattttaagctatttcaatcgtgccgcaccgttacatcacgatgatgaagaattagattttttccctcaattagtcaaagtggctccgcaaacacaaacttccattgatgaattagaaaaacagcacgaatatttgcatgaaaattggaatgcattatctgtgcagttagaagagcttatttctgaacaacgtcaaaatattgataaacatttaattgaacgctttattcaaggttatgatcgtcatattgcgttagaagagccgttatttgaaatggggcgtgaatgcttaagtgcggatattttgactgaaatgggcaagcacatgagtgctcgtcgtcaagttaaagaatga

SEQ ID NO: 486 - protein, 172 aa, Haemophilus influenzae
MQILEPQQFATWNEPIEMLYACHSKVKRFCRQLSILPDYLEKHGYTQAVLNDVGQILSYFNRAAPLHHDDEELDFFPQLVKVAPQTQTSIDELEKQHEYLHENWNALSVQLEELISEQRQNIDKHLIERFIQGYDRHIALEEPLFEMGRECLSADILTEMGKHMSARRQVKE

SEQ ID NO: 487 - DNA, 930 bp, Haemophilus influenzae
atgcgtaaacacggcgatttgcacgactttatgcaatggcatcgtccaattttgactgacagtggcggtttccaagtatttagtctgggtaaattacgtaaaattaccgaagaaggcgtaaaattccaaaacccaattaatggtgagcgtattttcctttcgcctgaaaaatccatggaaattcaatatgatttgggttctgatatcgtcatgattttcgatgaatgtaccccttacccagcgactttcgattatgcgaaaaaatctatggaaatgtcacttcgttgggcaaaacgcagccgcgatcgctttgatgaattaggcaataaaaatgcgttattcggtattatccaaggcggtgtatttgaagaattacgtaaagtatcattagaaggcttagtcaatattggttttgacggttatgcagtgggcggtttagcggtaggcgaaccaaaagaagatatgcaccgcattttagaatacatctgcccacaaatcccagctgacaaaccacgttatttaatgggcgtgggtaaaccagaagatttagtggaaggcgtgcgtcgtggcattgatatgtttgactgcgtaatgccaacccgtaacgcacgtaatggccatttatttgtgacagacggcattgtcaaaatccgtaatgcaaaatatcgtgatgataccagcccgttagatcctgaatgtgattgctacacctgtaaaaactacaccaaagcttatttatatcatttagataaatgcggtgaaattttaggtgcgcgcttaaataccattcacaatttacgctattatcaacgtttaatggcggaaattcgtcaggctattgaagacgatcgttttgatgattttgtggtggaattctatgcccgcatgggcaaacctgttccgccattacaattagcggataaatcataa

SEQ ID NO: 488 - protein, 309 aa, Haemophilus influenzae
MRKHGDLHDFMQWHRPILTDSGGFQVFSLGKLRKITEEGVKFQNPINGERIFLSPEKSMEIQYDLGSDIVMIFDECTPYPATFDYAKKSMEMSLRWAKRSRDRFDELGNKNALFGIIQGGVFEELRKVSLEGLVNIGFDGYAVGGLAVGEPKEDMHRILEYICPQIPADKPRYLMGVGKPEDLVEGVRRGIDMFDCVMPTRNARNGHLFVTDGIVKIRNAKYRDDTSPLDPECDCYTCKNYTKAYLYHLDKCGEILGARLNTIHNLRYYQRLMAEIRQAIEDDRFDDFVVEFYARMGKPVPPLQLADKS

SEQ ID NO: 489 - DNA, 126 bp, Haemophilus influenzae
  misc_feature 12, 13, 14, 15, 16: n is any nucleotide
atgaatgaatgnnnnntattgctttctctttttggctatcatctttatgaagaaatcacgcacgaatggctcggcttggtcttttttgctttgattatctcacatctttcactgaatacatggtag

SEQ ID NO: 490 - protein, 41 aa, Haemophilus influenzae
  VARIANT 4, 5, 6: Xaa is any amino acid
MNEXXXLLSLFGYHLYEEITHEWLGLVFFALIISHLSLNTW

SEQ ID NO: 491 - DNA, 123 bp, Haemophilus influenzae
ttgcaaagtgcggtcaattttgcaacttttttgttatttttaaccgcttgtatcagtggcattatgctttctaaacatctattggtggaaatgctattccactctaccacagatttaatgtga

SEQ ID NO: 492 - protein, 40 aa, Haemophilus influenzae
MQSAVNFATFLLFLTACISGIMLSKHLLVEMLFHSTTDLM

SEQ ID NO: 493 - DNA, 774 bp, Haemophilus influenzae
atgcagcaaacaaaacgttcgctattgggtttgcttatttctttgatcgcacacggtattgttataggatttatcttatggaattggaatgagccaagtgatagtgcaaatagcgcacaaggcgatatatctacaagtatttctatggagctattacagggcatggtgttggaagaacctgctccagagccagaagatgtacaaaaagagccagaaccagaaaaacaagaaattgtagaagatccaacaataaaacctgaaccgaaaaaaatcaaagaaccagaaaaggaaaagccaaaacccaaagaaaaaccaaaagaaaagccgaagaataaacctaaaaaagaggttaaaccacaaaagaaaccaatcaataaagagctaccaaaaggcgatgaaaatattgattcaagtgccaacgtaaatgataaagcaagtacaacaagcgcagctaatagcaatgcacaggtagcaggaagtggaacggatacgagtgaaatagcggcttaccgttctgcaatccgccgtgaaattgaaagccataaacgttatccaactcgagcgaagataatgcgcaaacaaggaaaagtgagtgtatcttttaatgtaggagctgatggttcgttaagtggtgctaaggttacaaaatcctcaggcgatgaaagtttagataaggcggcattagacgctattaacgtatctcgctctgttggaacaagacccgcaggatttccttcgagtttaagtgtgcaaattagttttactcttcaataa

SEQ ID NO: 494 - protein, 257 aa, Haemophilus influenzae
MQQTKRSLLGLLISLIAHGIVIGFILWNWNEPSDSANSAQGDISTSISMELLQGMVLEEPAPEPEDVQKEPEPEKQEIVEDPTIKPEPKKIKEPEKEKPKPKEKPKEKPKNKPKKEVKPQKKPINKELPKGDENIDSSANVNDKASTTSAANSNAQVAGSGTDTSEIAAYRSAIRREIESHKRYPTRAKIMRKQGKVSVSFNVGADGSLSGAKVTKSSGDESLDKAALDAINVSRSVGTRPAGFPSSLSVQISFTLQ

SEQ ID NO: 495 - DNA, 444 bp, Haemophilus influenzae
gtgaaaaaattcgatgaaatcaacattatccctttcattgatattatgttggtgctacttactgtggtgcttattactgcatcttttatctctcaaggtaaaattcaagtaaatgtaccaaaagctagtacagcggtcgcatttaaatctgacgagctagctaaattattgacagtgacagcggataaacaactctattttaatgataaacctatttctcaagaagctctagaggcagaaattgctcaatggaataaagatcagaaagtaactttaaaaattgatgccgaagcctctttccaagattttgtgacgattacagatatgctttctaaaaatgaaatcaaaaatgtggcaattgtttctatgaaagataagggaaaaagtgcgggtaaaaattctcaagaatctactccttcccaatctgtaccaactacgccgtaa

SEQ ID NO: 496 - protein, 147 aa, Haemophilus influenzae
MKKFDEINIIPFIDIMLVLLTVVLITASFISQGKIQVNVPKASTAVAFKSDELAKLLTVTADKQLYFNDKPISQEALEAEIAQWNKDQKVTLKIDAEASFQDFVTITDMLSKNEIKNVAIVSMKDKGKSAGKNSQESTPSQSVPTTP

SEQ ID NO: 497 - DNA, 453 bp, Haemophilus influenzae
atggtacaactttttgattttttacaacagtatagtgattattttatcatcggtttattattactgatgagcattattatgcttgcgatggtaattgaacgttatctttttttaagaaaggtaagcgtggcacattattctactattcacgcattagatattgatttaaaccgtaatatgacagtgatttctaccatcggtgcaaatgcgccttatgttggattacttggtacagttatcgggattttattaactttctatcaaatcggtcacggcggtggcgacattgatccaagtgtaattatgttgcacttatctttagcattaaaagcaacagcattaggtattctagtggctattccctctatggtgttttataacggtttggggcgtaaagttgaagttaatcgtttaaaatggaaagtattaagcgaacaaaaagataaggaataa

SEQ ID NO: 498 - protein, 150 aa, Haemophilus influenzae
MVQLFDFLQQYSDYFIIGLLLLMSIIMLAMVIERYLFLRKVSVAHYSTIHALDIDLNRNMTVISTIGANAPYVGLLGTVIGILLTFYQIGHGGGDIDPSVIMLHLSLALKATALGILVAIPSMVFYNGLGRKVEVNRLKWKVLSEQKDKE

SEQ ID NO: 499 - DNA, 468 bp, Haemophilus influenzae
atgaatccattatctgttggtaatcaagcacctgcttttaccttattaaatcaacaagaaaaatttgtttctttaagtgattttcgtggtaaaaaagttttaatttatttttatccaaaggctctcactccaggctgtaccacacaagcctgcggattgcgcgacagtaaatccgaattagatgtactaggtttagttgtacttggtattagtcctgatgccccgaaaaaattagctcaatttattgagaaaaaagaacttaatttcacattgctttctgatcctgatcatcaagttgcggagcaatttggcgtatggggcgaaaaaaaatttatggggagaacttacgacggtattcatcgaattagttttttaatcaatgaaagcggaactattatgcaagtatttgataaatttaagataaaagaccatcatcaaatgatcattgattatcttcgttccctataa

SEQ ID NO: 500 - protein, 155 aa, Haemophilus influenzae
MNPLSVGNQAPAFTLLNQQEKFVSLSDFRGKKVLIYFYPKALTPGCTTQACGLRDSKSELDVLGLVVLGISPDAPKKLAQFIEKKELNFTLLSDPDHQVAEQFGVWGEKKFMGRTYDGIHRISFLINESGTIMQVFDKFKIKDHHQMIIDYLRSL

SEQ ID NO: 501 - DNA, 897 bp, Haemophilus influenzae
atgtcagcgcaaaattctttattttcgggtagcatagttgcccttgttacgccaatgaatcattatggcgaagtcgatttttcctgtttagaaaaattagtagaacaccacattgaagctggttctaatgcgcttgtttctgtgggtacaacgggagaatccgccacgctaagtattgaagaaaatgtaaaagtcattgaaaagactgttgaatttgccaaaggacgtattcctattattgcgggagcgggcgcaaatgcgacgagtgaagcaattacaatgaccaaattattacgagacagtggtgtagcaggatgtttatctgttgtgccttattataataaaccaacccaagagggaatgtatcaacattttaaagccattgcggaatgtactgatttaccacagattctttataacgttcctagtcgcacaggcagtgatatgaaaccagaaacagttgctcgtttagctgaaattgaaaatattgtaggcattaaggaagcaacgagagatgttagccgaatagttaaaattaagcagcttgcaggtaagaattttattgttttaagtggcgatgatgcaacaggcttagaagcaataaaattaggtgctgaaggagtaatatcagtaacaaataacattgcagcaaaagatatggctgatatgtgccgttatgcacttgcgggagattttgataaagcggaagaaattaatgctcgtttaatgcgtttacatcacgacctgttcattgaatctaatccaattccagtgaagtgggcagcttatcgcttaggcttaattaaatcgccacatttacgcttgccacttacaacacttagtgaagaaattcaaccaaaagtagaagatgtgctaaaaatcgcaggattgttataa

SEQ ID NO: 502 - protein, 298 aa, Haemophilus influenzae
MSAQNSLFSGSIVALVTPMNHYGEVDFSCLEKLVEHHIEAGSNALVSVGTTGESATLSIEENVKVIEKTVEFAKGRIPIIAGAGANATSEAITMTKLLRDSGVAGCLSVVPYYNKPTQEGMYQHFKAIAECTDLPQILYNVPSRTGSDMKPETVARLAEIENIVGIKEATRDVSRIVKIKQLAGKNFIVLSGDDATGLEAIKLGAEGVISVTNNIAAKDMADMCRYALAGDFDKAEEINARLMRLHHDLFIESNPIPVKWAAYRLGLIKSPHLRLPLTTLSEEIQPKVEDVLKIAGLL

SEQ ID NO: 503 - DNA, 630 bp, Haemophilus influenzae
atgaaaaaaataatattgaatttagtaacggctattattctagctggttgttcgtctaatcctgaaaccttaaaagcaaccaacgattcatttcaaaaatctgagacgagcattccccatttttcccctttggctactggaggtgtacagttaccaaaagctgatgatgcctattcattacctaatattgaagtgaaaaaaggggaagatattgatattcgcccaccattaatccctctcgctattattcaaaattcaataacaaaatttgatggcgaacgttcgttgattgtctatccaaaacaacaggcaaaactatataatcttcagcaagttaagcgtttgttgaaagatgagggtatttcatcaacaacagatggttcgattttaacaactgattgggcaaaaacagaacgaattggcgataaatctatagaaataaaatatcaaatagaacaagttatgacagctgatgtaagtgcgcttaccgtatctattttacatatgcgccgagatggtattatttttacaccaaatgtatcagataaacaatattatacttcggaacgtttaaatcgcattgttttaacactcactaccgcgtataacaaacaattacaggatttataa

SEQ ID NO: 504 - protein, 209 aa, Haemophilus influenzae
MKKIILNLVTAIILAGCSSNPETLKATNDSFQKSETSIPHFSPLATGGVQLPKADDAYSLPNIEVKKGEDIDIRPPLIPLAIIQNSITKFDGERSLIVYPKQQAKLYNLQQVKRLLKDEGISSTTDGSILTTDWAKTERIGDKSIEIKYQIEQVMTADVSALTVSILHMRRDGIIFTPNVSDKQYYTSERLNRIVLTLTTAYNKQLQDL

SEQ ID NO: 505 - DNA, 324 bp, Haemophilus influenzae
atgacacttaatattaccagtaaacaaatggacatcactcctgcaattcgtgaacacttggaggaaagacttgcgaagttaggtaagtggcaaacgcagttaattagcccacattttgttttaaacaaagtacctaatggatttagtgtcgaagcctctattggcacacccttaggcaatttattagccagtgcaacttcagatgatatgtataaagcaattaatgaagtggaagaaaaattagaacgtcagcttaataaacttcaacataaaagtgaatctcgccgagctgatgaacgtttaaaagattcttttgaaaactaa

SEQ ID NO: 506 - protein, 107 aa, Haemophilus influenzae
MTLNITSKQMDITPAIREHLEERLAKLGKWQTQLISPHFVLNKVPNGFSVEASIGTPLGNLLASATSDDMYKAINEVEEKLERQLNKLQHKSESRRADERLKDSFEN

SEQ ID NO: 507 - DNA, 897 bp, Haemophilus influenzae
atgaatattatattttcgtctgacaactattatgcaccttatttagctgtaagtatttttagcattattaaaaatacacctaaaaaaataaatttttatattcttgatatgaaaataaatcaggaaaataagaccataataaataatttagcaagcgaatattcttgtaaagtatttttcttgccagtttgtgagtcagattttcaaaactttccaaaaacaatagattatatatctttagctacttacgctagactaaatttaactaaatacataaagaatatagaaaaagctatttatattgatgtggacacattaacaaactcttcacttcaagaactttggaatatagatataacgaactattatttggcagcatgtcgagatacttttattgatgtaaaaaatgaagcttataaaaaaacaattggtttagaaggagatttttattttaatgcgggcatattattaattaatttaaataaatggaaagaagaaaatattttccaaaaatcaataaattggatgaataaatacaataatgttatgaaataccaagatcaagatattctaaatggtatctgtaaaggaaaagtaaaatttattaataatagatttaattttacaccaacggatcgagatttgattaaaaagaaaaatttattatacgtaaaaatgccaatagttatttctcattattgtggtccaaataaattttggcacaaaaaatgcagtcacttaaattgtcatataggaaatttacttttaaaagaaatggataaaattattgatataccatcatcttggtatgatcattttgagaaaatcccttttttaattaaaataaaaaggttaagaaagagaataagagataaattaatatatggtatttattaa

SEQ ID NO: 508 - protein, 298 aa, Haemophilus influenzae
MNIIFSSDNYYAPYLAVSIFSIIKNTPKKINFYILDMKINQENKTIINNLASEYSCKVFFLPVCESDFQNFPKTIDYISLATYARLNLTKYIKNIEKAIYIDVDTLTNSSLQELWNIDITNYYLAACRDTFIDVKNEAYKKTIGLEGDFYFNAGILLINLNKWKEENIFQKSINWMNKYNNVMKYQDQDILNGICKGKVKFINNRFNFTPTDRDLIKKKNLLYVKMPIVISHYCGPNKFWHKKCSHLNCHIGNLLLKEMDKIIDIPSSWYDHFEKIPFLIKIKRLRKRIRDKLIYGIY

SEQ ID NO: 509 - DNA, 588 bp, Haemophilus influenzae
atgaaacaaaaaatcgtacttgctacaggcaataaaggcaaagtgaaagaaatggctgatgttctatctgattttggttttgaagtgattgcacaaacagatttaggcattgaaagcccagaagaaacaggcttaacttttgtcgaaaatgcgttattaaaagcacgttatgcatcagaaaaatcaggtttacctgctattgcggatgattcaggcttggtggtttccgcacttaatggcgcaccaggtctgtattctgcacgttatgctggtgaagagggcaatgatgctaaaaaccgtgagaaattattggcagagcttgctcatgttgcacaagatcaacgccaagctaaatttgtgagttgtatcgtgtttttacaacatccaacagatccatcgccaattatcgccgaaggcgagtgttgtggcgtgattggttttgaagaaaaaggcgaaaatggctttggttatgacagtttattctttagcccagaacaaggttgcacatttgctgaattagaaacggttgagaagaaaaaaatttctcatcgagcaaaggcattgagtgttttaaaaagtaaattataa

SEQ ID NO: 510 - protein, 195 aa, Haemophilus influenzae
MKQKIVLATGNKGKVKEMADVLSDFGFEVIAQTDLGIESPEETGLTFVENALLKARYASEKSGLPAIADDSGLVVSALNGAPGLYSARYAGEEGNDAKNREKLLAELAHVAQDQRQAKFVSCIVFLQHPTDPSPIIAEGECCGVIGFEEKGENGFGYDSLFFSPEQGCTFAELETVEKKKISHRAKALSVLKSKL

SEQ ID NO: 511 - DNA, 726 bp, Haemophilus influenzae
atgcaccaattccaacaagataaccaatattttatctttaattttgaccgcacttttgagcaagcaaccgagtttttccaagcggaattttggcaaaaacaagaacgagtgataggaagtgcaaaaggtcgaggcactacttatttcttgcaaacggaagattggtttggcgtaaattgtgcgttgcgtcattattatcgaggtggactttggggtaaactgaacaaagatcgttatcgtttttctgctcttgacactacccgtagttttgctgagtttcatttgttgcaacgtttgtatgaagcaggtttgcctgtgcctaaacccattgccgcacgtattcaaaaaggcaagttaggtatttgttatcaagcggatattttgaccgagaaaatcgaaaattcgcaggatttaaccgcacttttacaaacacaaacattgccaaaagaaacttggaggcaaattggtcgtttgattcgaaaactacatgatttacagatttgtcatactgacttgaatgcacacaatattttgcttcaacaagctgaacaagagcaaaaatgttggttgattgattttgataagtgcggtaaaaaatcaggggatttttggaaagcacaaaatctgaatcgtttaaaacgttcctttgaaaaagaagttggacgaatgaatattcaatttaccgagcaaaactgggctgatttaacggcagcttatcatcaataa

SEQ ID NO: 512 - protein, 241 aa, Haemophilus influenzae
MHQFQQDNQYFIFNFDRTFEQATEFFQAEFWQKQERVIGSAKGRGTTYFLQTEDWFGVNCALRHYYRGGLWGKLNKDRYRFSALDTTRSFAEFHLLQRLYEAGLPVPKPIAARIQKGKLGICYQADILTEKIENSQDLTALLQTQTLPKETWRQIGRLIRKLHDLQICHTDLNAHNILLQQAEQEQKCWLIDFDKCGKKSGDFWKAQNLNRLKRSFEKEVGRMNIQFTEQNWADLTAAYHQ

SEQ ID NO: 513 - DNA, 1044 bp, Haemophilus influenzae
atgccactttttaccgaagctccaaaatccctttgtattctccgattgtcagcggtaggcgatgtttgccacgccttagctgtggttcagcacattcaggcatattatccccaaacagaaatgacttggattgtaggaaaaaccgaaataggtttgctttcaggcattcctaatatcacgctcattccttatgataaaaaaacaggatggaaaggtgttttatcactttggaaacaactaaaaaataaacagtttgatgcgctattaaatatgcaaacagcatttcgtgcatcaatcctttctttaggaattaaagcaaaattcaaaattggatttggagaaaaacgttctcgcgaagggcaatggctatttgtaaatcgtcgcatcagagatcctttttcccctcacgtattagatggatttatggctttcgctgaatatattggcgtgccgaaagcagaaccgaaatgggaattagctatctcacaagatgattataaatttgccgatcaatttattgatttctctcgtaaaaatttattaatttccccttgttctagcaaagcagaaaaagattggctaatcgaaggttatgcagaggttgccaatattgcccatcagcataatatcaatgtaatcttctgcagttcgccagccaaacgtgaattagaaatagtcgaaaaaattaccgcactttgccatttcacaccaactaatattgcaggaaaaacaaacctaaaacagcttaccgctttaatttctaaggttgatttggtgctttcgccagattctggccctgcccatattgcgacaacacaaggaacaccagttattggcttatatgcctatcacaatcctttacggactgcaccttataagaatttagataacgtggtatctgtatatgaagaaaatgcccaaaaagaatttggcaaaccgtcttctgaactaccttgggcaaccaaactaaaaggaaaaaatttgatggcagagattcaagtcgaacccgtcattgaacaaatgaaaaaattgggattattttga

SEQ ID NO: 514 - protein, 347 aa, Haemophilus influenzae
MPLFTEAPKSLCILRLSAVGDVCHALAVVQHIQAYYPQTEMTWIVGKTEIGLLSGIPNITLIPYDKKTGWKGVLSLWKQLKNKQFDALLNMQTAFRASILSLGIKAKFKIGFGEKRSREGQWLFVNRRIRDPFSPHVLDGFMAFAEYIGVPKAEPKWELAISQDDYKFADQFIDFSRKNLLISPCSSKAEKDWLIEGYAEVANIAHQHNINVIFCSSPAKRELEIVEKITALCHFTPTNIAGKTNLKQLTALISKVDLVLSPDSGPAHIATTQGTPVIGLYAYHNPLRTAPYKNLDNVVSVYEENAQKEFGKPSSELPWATKLKGKNLMAEIQVEPVIEQMKKLGLF

SEQ ID NO: 515 - DNA, 2163 bp, Haemophilus influenzae
atgcgattttctaaactttcccttgcaattgcaacaaccttagtgacagcaaatgcgctagcgcaatccgttgaattagactctatcaacgttattgcgacacgagatccaagtaggtttgcttatacgccagaaaaacaatctaaagatagtcttctttccaagcaagccactagtgttgcagcagcgttagaagacattcccaatgttgatattagaggcggttcaagaagcattgctcaaaaacctaatattcgagggttaagtgataatcgtgttgtgcaagtcattgatggcgtgagacaaaattttgatttagcacatagaggttcttattttcttccaatgtcactcatccaagaaattgaagtaatcaaaggaccaagtagctccttatggggtagcggtgcattgggtggtgttgtggcaatgcgtacgccaaatgctttggacttattgaaaaataatgacaaattcggagttaaaattcgccaaggttatcaaactgctaataatttatcggaaagggatgtttctgtatttgcggcaaatgacaaattcgatgttcttattagtggtttctataataatgcggataatttacgcactggtaaaggcaataagctgaataataccgcctataaacagtttgggggcttagcaaaattcggttggcaaattaatgatgctaaccgcgtggaattatcccaccgcgaaactcgttttaaacaaacagcaccaagcaataatgaggtggaaaacgaacttaccaatgaacaaattacagatcaaatcagagagttccacaaaccaaacaacggttctccaccgaaagccaaaccatcacaagaagagttttactctggcgtgaaaacacgttttggtagtgtcagttatttaactgatcaacaaattcctgatcaaagcacggtatttaactattatttaacgccagataatccttatctaaatacgcatatcgcactgtataacaataaaactattgagaaagaacagcgtaaagtcagtggtgtgaaagatcagactaaattaactacccgaggtataaatttacgtaattcttccgaattatctcacatttcctttgtttatggggtggattatatgcgagataaaatccgtaccgaacgaggcacaaacaatactgatgcgaagtttcgagcggaaccctataatgcgaattcaaacactacaggcgtttatttaatcgctcatattccgctatttggggaaaaattgctaatttcgccaagtgtacgttatgaccactacgatacctcaagtaaaactgtaaaatacaaggataatcatttatctcctgccacaaaattaacttggatagtgaccaattggttagattttactgccaaatataatgaagctttccgagcaccatctatgcaagagcggtttgtgagtggtgctcactttggggcaaatcttattggagggctagatacaatcaatagatttgtagcaaatccaaatttgcgccctgaaacagcgaaaaataaagaaattaccgcaaatctacattttgatagtctgtttaaacaaggcgataaattcaaaattgaagcgacttatttccgtaatgatgtgaaagattttattaacttaaaaatatttaatgatgcaaatacaaataaaaatgcaagtgcaagtgcaaatggagcattgttgccattgccaacaaaatcccagtatcaaaacataactaatgcccgtttaagcggtattgaattgcaagctcaataccaaacagaacgtttaacactgtttactaactatggcagcaccaaaggtaaagataaagatagtggcgaagctttatcaaacattgccgcaagcaaaatcggcgtaggggtaaattatgctttagtaaaagacaaattcactgtgggagcgacagtaacccattacgctgctcaacgccgagtgcctaaagatcatggtgttacctacccaagttatatactgactgatcttcgtgctacctatgcaccattaaaaggcgaatggaaaaacctgcgtttagattttgcgctggaaaacttgtttgatagaaaatatcaacccgcgtttagtttaatggaaggcactggtcgtaatgcgaaaattagtgcagtttatagcttctaa

SEQ ID NO: 516 - protein, 720 aa, Haemophilus influenzae
MRFSKLSLAIATTLVTANALAQSVELDSINVIATRDPSRFAYTPEKQSKDSLLSKQATSVAAALEDIPNVDIRGGSRSIAQKPNIRGLSDNRVVQVIDGVRQNFDLAHRGSYFLPMSLIQEIEVIKGPSSSLWGSGALGGVVAMRTPNALDLLKNNDKFGVKIRQGYQTANNLSERDVSVFAANDKFDVLISGFYNNADNLRTGKGNKLNNTAYKQFGGLAKFGWQINDANRVELSHRETRFKQTAPSNNEVENELTNEQITDQIREFHKPNNGSPPKAKPSQEEFYSGVKTRFGSVSYLTDQQIPDQSTVFNYYLTPDNPYLNTHIALYNNKTIEKEQRKVSGVKDQTKLTTRGINLRNSSELSHISFVYGVDYMRDKIRTERGTNNTDAKFRAEPYNANSNTTGVYLIAHIPLFGEKLLISPSVRYDHYDTSSKTVKYKDNHLSPATKLTWIVTNWLDFTAKYNEAFRAPSMQERFVSGAHFGANLIGGLDTINRFVANPNLRPETAKNKEITANLHFDSLFKQGDKFKIEATYFRNDVKDFINLKIFNDANTNKNASASANGALLPLPTKSQYQNITNARLSGIELQAQYQTERLTLFTNYGSTKGKDKDSGEALSNIAASKIGVGVNYALVKDKFTVGATVTHYAAQRRVPKDHGVTYPSYILTDLRATYAPLKGEWKNLRLDFALENLFDRKYQPAFSLMEGTGRNAKISAVYSF

SEQ ID NO: 517 - DNA, 1692 bp, Haemophilus influenzae
atgagacctcgttattctgttattgcaagtgcggtcagtttaggctttgttttgagtaaatcagtgatggcattaggtcagccagatactggatcattaaaccgtgaactagaacaacgtcgaattcaatcagaagccaaacctagtggcgaattatttaatcaaacggcaaattcgccttatactgcacagtataaacaaggactgaaatttccacttacgcaagtacagattttagatcgaaacaatcaagaagtcgtcacagacgagcttgcacatattttaaaaaattatgtaggaaaagaggtatcgctgtcagatttaagtaatttggcaaatgagatcagcgaattttatcgtcataataattatttagtggcaaaagcaattttaccaccacaggaaattgagcaaggtacggtaaaaattttgttacttaaaggtaatgtaggcgaaatacgcttgcaaaatcacagcgcattaagcaataaatttgtatcccgtctctctaatacaacagtgaatacgtccgaatttattttgaaagatgagttagaaaaatttgctttaacaataaacgatgttccaggggtaaatgctggtttgcaactctccgcaggcaaaaaagtcggcgaagcgaatttactgattaagattaacgatgcaaaacgtttttctagttatgtttcagtagataaccaaggcaacaaatatacaggacgttaccgtttggctgcggggacaaaagtcagtaatttgaatggctggggcgatgaattgaaactggatttaatgagttctaatcaggctaatttaaaaaatgctcgtatagattattcctctttaattgatggttattctacgcgttttggtgtaacggctaactatctcgactacaaattaggtggtaattttaaatcattacaatctcaagggcattcccataccttaggggcttatttgttgcacccaacaatccgtacaccaaattttcgtttaagtactaaagtgagctttaatcatcaaaaccttacggataaacaacaagcggtttatgcgaaacaaaaacggaaaataaatagtttaactgcagggattgacggttcttggaatcttattaaagatgggacaacttatttttcattatctaccttgttcggtaatttagcgaatcaaactagtgaaaaaaaacataatgcagtagagaattttcaaccaaaatcgcattttacggtatataactaccgcttgtctcacgagcaaattttaccaaaatcttttgctttcaatattggtataaacggtcagtttgccgataaaacccttgaaagctcacagaaaatgttgcttggtggtttgtctggagtacgtggacatcaagctggtgcggcttctgtggatgaagggcatttgatacaaacagaattcaaacattatttaccagtcttttcccaaagtgtgctagttagttcattgttctatgactatggtttgggaaaatattataaaaatagccaatttctcgaacaaggcgtgaaaaatagcgtgaaattacaaagcgttggtgcaggactttctctttcagatgctggcagctatgccatcaatgtcagtgtcgccaaaccgcttgataacaatattaataatgccgataaacaccaattttggctttctatgattaaaactttctaa

SEQ ID NO: 518 - protein, 563 aa, Haemophilus influenzae
MRPRYSVIASAVSLGFVLSKSVMALGQPDTGSLNRELEQRRIQSEAKPSGELFNQTANSPYTAQYKQGLKFPLTQVQILDRNNQEVVTDELAHILKNYVGKEVSLSDLSNLANEISEFYRHNNYLVAKAILPPQEIEQGTVKILLLKGNVGEIRLQNHSALSNKFVSRLSNTTVNTSEFILKDELEKFALTINDVPGVNAGLQLSAGKKVGEANLLIKINDAKRFSSYVSVDNQGNKYTGRYRLAAGTKVSNLNGWGDELKLDLMSSNQANLKNARIDYSSLIDGYSTRFGVTANYLDYKLGGNFKSLQSQGHSHTLGAYLLHPTIRTPNFRLSTKVSFNHQNLTDKQQAVYAKQKRKINSLTAGIDGSWNLIKDGTTYFSLSTLFGNLANQTSEKKHNAVENFQPKSHFTVYNYRLSHEQILPKSFAFNIGINGQFADKTLESSQKMLLGGLSGVRGHQAGAASVDEGHLIQTEFKHYLPVFSQSVLVSSLFYDYGLGKYYKNSQFLEQGVKNSVKLQSVGAGLSLSDAGSYAINVSVAKPLDNNINNADKHQFWLSMIKTF

SEQ ID NO: 519 - DNA, 1875 bp, Haemophilus influenzae
atgtataaattaaatgtaatttctcttatcattttgaccacttgcagtggtgcggcatatgcctctacaccggattttccacaacatcacaaaactgtttttgggactgtcactattgagaaaactactgcagataaaatgacgattaagcaagggtccgataaagctcaaatagactggaagagttttgacatcggtcaaaagaaagaagtgaaatttgaacagcctaacgaacatgctgtggcatataaccgtgtaattggcggcaatgctagccaaatccaagggaaattgacggcaaacggtaaagtttatttagcaaaccctaatggggttattattacccaaggggcagaaattaatgtagctggtttacttgcaacaactaaagatttagagagaatcagtgaaaatagcaatagctatcaatttacccgtagaacaaaagaccgtcaggtgctaaaagaaggtctggtgctaaaagacggtcaggtggtaaaagaaggtcaagttatcaatgaagggaacattacggcacaagatttcgtggtacttaatggcgatgaagttatcaataaagggaacattaacgttgaaaaaaactctacaatcaatggcaaagtatatttatcctcaggctataattttacatttaccttaccagatagcggtataagtgtggcattagaagataatacagtacagggtattgttaaaaatgaagggagcattaaagcaggagagattacgttaagtgcaaaagggcgtaaacaagcattagatagcttggttatgaataatggtgtgttagaagcaactaaggttagtaataaaaacggcaaggttgtgttatctgctgacaatgttgagttgaataatgaaagtaatattaaaggggagatagttacttttggggctgatgttacctcaaataaggaacttaaagacaatataaaaatcacttctaaaactggctcaaaagttacctcgcctaaaatcaactttacaggcaaaagcgttaatatcaatggtaactttgggcgtgaagatagtacaacgcactataaagatgaatttaaaaaattaaatacagaagttaatattgacgtgccagacaatgaaaatattcgtattgcggatattgaagataatacgggcacgggtacgacgggtacgggtacgagttcatttatacaaacaggggcgttaagttcattactagctaataatggaaaagtgaatcttaaaggaaataacgttaatatttcaggacgtattcatatagattcctttagaggctcagattcgctattaaagctaactaacaaaggtcatattgatatcaataatgcggatattcactcaaaaggtcgtttattttttataaccagtttgcagaatgaggaagattttaaatcaaatattaccattactgacagcaaaataaatcttggtaacggagctatgggattggggcgtagtgtcgatgaaaaagactacgataaccgatggcagaaaacggaaggatcacaacgcaagaagtttgatgttaagatgagtaacgtagaatttaatcaggttgatgatgtgattttagcaggtggatttgaaaaagttaatttagataaaatcgttgccacaggacaaacgaatttttacattgatgggggggtatcccgtaatggaagaaaatatgaatacggtgtgttagatttagacaaacgtacgcagttatcggagttaaatcaaggcagacgccgttggggatattactatgatttagagttagatatgaatagagcctatttgtatcgttttgatctgtttgccactaaaaatacggggcgatcaactattaaaggacacagaaattaa

SEQ ID NO: 520 - protein, 624 aa, Haemophilus influenzae
MYKLNVISLIILTTCSGAAYASTPDFPQHHKTVFGTVTIEKTTADKMTIKQGSDKAQIDWKSFDIGQKKEVKFEQPNEHAVAYNRVIGGNASQIQGKLTANGKVYLANPNGVIITQGAEINVAGLLATTKDLERISENSNSYQFTRRTKDRQVLKEGLVLKDGQVVKEGQVINEGNITAQDFVVLNGDEVINKGNINVEKNSTINGKVYLSSGYNFTFTLPDSGISVALEDNTVQGIVKNEGSIKAGEITLSAKGRKQALDSLVMNNGVLEATKVSNKNGKVVLSADNVELNNESNIKGEIVTFGADVTSNKELKDNIKITSKTGSKVTSPKINFTGKSVNINGNFGREDSTTHYKDEFKKLNTEVNIDVPDNENIRIADIEDNTGTGTTGTGTSSFIQTGALSSLLANNGKVNLKGNNVNISGRIHIDSFRGSDSLLKLTNKGHIDINNADIHSKGRLFFITSLQNEEDFKSNITITDSKINLGNGAMGLGRSVDEKDYDNRWQKTEGSQRKKFDVKMSNVEFNQVDDVILAGGFEKVNLDKIVATGQTNFYIDGGVSRNGRKYEYGVLDLDKRTQLSELNQGRRRWGYYYDLELDMNRAYLYRFDLFATKNTGRSTIKGHRN

SEQ ID NO: 521 - DNA, 972 bp, Haemophilus influenzae
ttgatctgtttgccactaaaaatacggggcgatcaactattaaaggacacagaaattaatatttctaacagtaatattaatctgaaaaatggatttgtacatttactggcagaaaaaattaaattagataatagcaagattgatattacctttgataaagataattcacaagatactttagctcaaacaaaccgtttaggaatgaatggtaaagtgtcaatgataaactcacatatcaaaatcgtgggcgatgagaaagagggtatatctccaactgggacttatgctacgatgtttttaatcggggaattaataggggaaaaaagttctatttttgtgaaatctcatcagggttacacctttaaaactgatggcaatacaaaaattgcaggtaaatacagcaaagaggacttgaaaattaccgcaattaacactggaggaagagcagcggaagaagttctaattaatggggcgttgggttcagctgataatgatgctaatatcgccaatatggcatttactattggtgattcagcgaataccaaaacaaccattgaaaatgccgacatcactgccttagcaccaaacggtgggacagcttatttaagctccaaagatgtagaaattgaggtaaaaccaaattcaaatttcacattctttgaacttcctcgtgagaaaaaccttaatcaaacaaaaattaacggtgcttctaccaaactcagtgaacgtggttttgctagactttatgacaaaattaacggtgtgcgagccagcaacttgtctgctgagcaattgaatgttacggacgcaagcgaaaaaatcattaatacaaagttagtgagtagcttagatgttgaaaaacttgtttctgttgcagtttgtgatgcaggtaacggttgcgaagaacaacaattcggcgataaaggtaataatactaaagtgagtgttggagagttagaagctgaacaataa

SEQ ID NO: 522 - protein, 323 aa, Haemophilus influenzae
MICLPLKIRGDQLLKDTEINISNSNINLKNGFVHLLAEKIKLDNSKIDITFDKDNSQDTLAQTNRLGMNGKVSMINSHIKIVGDEKEGISPTGTYATMFLIGELIGEKSSIFVKSHQGYTFKTDGNTKIAGKYSKEDLKITAINTGGRAAEEVLINGALGSADNDANIANMAFTIGDSANTKTTIENADITALAPNGGTAYLSSKDVEIEVKPNSNFTFFELPREKNLNQTKINGASTKLSERGFARLYDKINGVRASNLSAEQLNVTDASEKIINTKLVSSLDVEKLVSVAVCDAGNGCEEQQFGDKGNNTKVSVGELEAEQ

SEQ ID NO: 523 - DNA, 357 bp, Haemophilus influenzae
atggatcgtgtttttattgaagaattgactgtttttgcacaaatcggtgtatatgattgggaacagcaaataaagcaaaaacttgtgtttgatttagaaatggcttgggattgcaaacaagcggcagaaacggatgatgttgcatattgtttaaattatgctgaagtgagccaagcgattattgattatgtggaaagcaaacctttcttgctgattgagcgagtggcttatgaagtggcggatttgcttgagtcacgttatcaacttcaaggattaaaaattaaactgagtaaaccaaaagccgtcgcgcaagctcgaaatgttggcgtattgattgttcgtggttgtttaaaataa

SEQ ID NO: 524 - protein, 118 aa, Haemophilus influenzae
MDRVFIEELTVFAQIGVYDWEQQIKQKLVFDLEMAWDCKQAAETDDVAYCLNYAEVSQAIIDYVESKPFLLIERVAYEVADLLESRYQLQGLKIKLSKPKAVAQARNVGVLIVRGCLK

SEQ ID NO: 525 - DNA, 600 bp, Haemophilus influenzae
atgagccttttcgcccttttttatatgctttttgcctatcttttaggctcaatttccagtgcgattttaatttgtcgcattgcaggcttgccagatccacgtcaaaatggttcacacaatcctggggcgacaaatgtgttgcgcattggaaatcgtaagtctgccttggcggtgcttatttttgatatgttaaaagggatgattcctgtatgggctgggtattatttaggtttaacccaatttgaattaggaatggtcgcacttggtgcttgtttagggcatattttcccaattttctttcaatttaaaggtggcaaaggtgttgcaactgcctttggggcaatcgcaccgatttcttgggctgttgcaggttcaatgtttggtacgtggatctttgtttttcttgttagtggctattcttcattaagtgcggttatttctgcattacttgtgcctttttatgtgtggtggtttaaacctgaatttacttttcctgttgcactggtgtgttgcctattaatttatcgtcatcacgataacattcaacgcttatggcgtggtcaagaagataaagtttgggctaaatttaaaaagaaataa

SEQ ID NO: 526 - protein, 199 aa, Haemophilus influenzae
MSLFALFYMLFAYLLGSISSAILICRIAGLPDPRQNGSHNPGATNVLRIGNRKSALAVLIFDMLKGMIPVWAGYYLGLTQFELGMVALGACLGHIFPIFFQFKGGKGVATAFGAIAPISWAVAGSMFGTWIFVFLVSGYSSLSAVISALLVPFYVWWFKPEFTFPVALVCCLLIYRHHDNIQRLWRGQEDKVWAKFKKK

SEQ ID NO: 527 - DNA, 1704 bp, Haemophilus influenzae
gtgtatactaaaggttccgtttccacccgtattgcgaaatatttatttatcattcttatcgttgctggtgtgattagttctctaagtttggcaattatgagcagtaataaatatgatgccgaagccattaatatttcaggttctttgcgtatgcaaagttatcgcttgctttatgaaatgcaagaacaaccagaaagcgtggaaacgaacttacgccgttatcatataagccttcattcatctgctttactagaagttcaaaatcaatttttcacaccgaatgtattaaaacattcctatcaaaacattttgcaacgttggacgaacatggaaaaatatgcgcgccaacaggatgtaaaaaactatagtaagcagcttactaactatgtggcagatgttgattattttgtgtttgaactacaacgttttagtgagcaaaaatggattttgggcgtatcggtgctttttttcgctatgttgttaattttagctatggtgtcttatgtgatttggtacacacagcgagaagttgtgaaacctttgcatttaatgacaaaagccagtatgcaagtgcaaatgcgtcaattcaatcatattccacttgacacaaggaaacaaaatgaacttggcacactggctcgcgtatttacacaaatgtccacagaactgggacagctttattcccgtttagaagaagctgtaaacgaaaaaacgcaaaagttgcgtcaaactaaccgcactttaagcactctttatcaaagtgctcaacttctgaatacaaacacaattaacgataaaattttaaatcaagttttgaattacatttttattagcaaccatttgaacttcgttaaagtggaagtgatgggggctgaacattgggatattacattgggtaagcaagatgctaataatgaactacaaatcgaaaccctttctgtggataacgaagaattaggtgtactgtcttggcaagcaggattaccttgtccagatcctcgaattatgcaaaatttagcacaaatgcttgctcgtgcgctttatttccataaaaatttacgtcagaaagaacagcttttattaatggaagaacgctcaattattgcgcgagagttgcacgattctttggctcaagtcttatcatttttacaaattcaacttactttgctcaaacataatctgaagaaagaagacgaacaatcaaaagaaaagagtttggcaattattgccaattttgaacaagccctttctggtggttatgcacagttacgtgagcttttagccactttccgtttaaccatacaagaagcgaatttacagcttgcactaaaacaagtgattgattcattacgctcgcaaacaacaatgcaaatgaatgtgaattgtcaattaccatcgcaaagtttgaaccctcaacagctggttcacgttctgcaaattgtacgtgaagccaccaccaatgcgatcaagcattctcaaggcacggtaattgaaattagcgcaagaattaatgcggaaggcgagtatgaaattttagttgaagatgatggggttggcattccaaatcttgaggagccagaagggcattacggcttgaatattatggcggaacgttgtcgtcagcttaatgcacaattgcatattcatcgccgagagcaaggcggcacacaagtcaaaattaccttgccacatacattatattag

SEQ ID NO: 528 - protein, 567 aa, Haemophilus influenzae
MYTKGSVSTRIAKYLFIILIVAGVISSLSLAIMSSNKYDAEAINISGSLRMQSYRLLYEMQEQPESVETNLRRYHISLHSSALLEVQNQFFTPNVLKHSYQNILQRWTNMEKYARQQDVKNYSKQLTNYVADVDYFVFELQRFSEQKWILGVSVLFFAMLLILAMVSYVIWYTQREVVKPLHLMTKASMQVQMRQFNHIPLDTRKQNELGTLARVFTQMSTELGQLYSRLEEAVNEKTQKLRQTNRTLSTLYQSAQLLNTNTINDKILNQVLNYIFISNHLNFVKVEVMGAEHWDITLGKQDANNELQIETLSVDNEELGVLSWQAGLPCPDPRIMQNLAQMLARALYFHKNLRQKEQLLLMEERSIIARELHDSLAQVLSFLQIQLTLLKHNLKKEDEQSKEKSLAIIANFEQALSGGYAQLRELLATFRLTIQEANLQLALKQVIDSLRSQTTMQMNVNCQLPSQSLNPQQLVHVLQIVREATTNAIKHSQGTVIEISARINAEGEYEILVEDDGVGIPNLEEPEGHYGLNIMAERCRQLNAQLHIHRREQGGTQVKITLPHTLY

SEQ ID NO: 529 - DNA, 1026 bp, Haemophilus influenzae
atgcaaaatttacaaccttttcacactttccacattcagtctaatgctcgtgaaattattgaagcacatagtatcgaacagctacaacaagtgtgggcgcattctaaatcagaaaatttacccactctttttttaggtcaaggaagtaatgttctatttctagatgattttaatggcatcgtgatccttaatcgtttaatggggattacgcacgaacaagatgcaaattttcactatcttcacgtcaatggcggggaaaattggcataaattggtggagtggtctattaataatggtatttatggcttagaaaatctggctctgattcccggttgtgcaggctctgcccccattcaaaatatcggtgcttatggcgttgaatttaaagatgtatgtgattatgtggaggtacttaatttaaatacgaacgaaacctttagactcgacacagaacaatgtgaatttggttatcgtgagagtatttttaaacatcgttatcagcaaggttatgtgattacagcggttggattaaagctaaaaaaagattggcagcctattctaaaatatggttcgcttgtagagttcgatccgaaaacggtcaccgctaaacaaatttttgatgaagtctgtcatatccgtcaaagcaaattacctgacccaaatgaagtgggtaatgcgggcagtttctttaaaaatcccgttgtcagttcagaacattttgaagaaatcaaaaaacatcacgaaaatctaccgcactttccacaagctgatggctcagtgaaattagcggcaggctggctgattgatcaatgcaatcttaaaggttttcaaattggtggggctgcggttcataaaaaacaagcattagtattgattaacaaagataatgcaagtggacaagacgtgataaaacttgcatattatgtacgccaaagcgttgctgaaaaatttggtgtatatttacaacctgaagtacgatttatcagtgcaactggcgaagtaaatagtgagcaaattatcacgtaa

SEQ ID NO: 530 - protein, 341 aa, Haemophilus influenzae
MQNLQPFHTFHIQSNAREIIEAHSIEQLQQVWAHSKSENLPTLFLGQGSNVLFLDDFNGIVILNRLMGITHEQDANFHYLHVNGGENWHKLVEWSINNGIYGLENLALIPGCAGSAPIQNIGAYGVEFKDVCDYVEVLNLNTNETFRLDTEQCEFGYRESIFKHRYQQGYVITAVGLKLKKDWQPILKYGSLVEFDPKTVTAKQIFDEVCHIRQSKLPDPNEVGNAGSFFKNPVVSSEHFEEIKKHHENLPHFPQADGSVKLAAGWLIDQCNLKGFQIGGAAVHKKQALVLINKDNASGQDVIKLAYYVRQSVAEKFGVYLQPEVRFISATGEVNSEQIIT

SEQ ID NO: 531 - DNA, 846 bp, Haemophilus influenzae
atggataaagaaacacaaatgatgttagttcctcaaggcagtatcgaaggttatattcgtgcagcaaatgaatatccgatgctgaccgcagaggaagaaaaggaattggcagaacgtttgtattatcacgaggatttagatgcagcgaaaaaactcattttgtcgcatcttcgtttcgtgatccacgtggcgcgtggctattctggctatggtttgccacaagctgacttaatccaagagggcaatatcggtttaatgaaagcggtcaaacgttttaaccctgaagttggtgtacgcttggtgtcattcgctgtgcattggattaaagcagagatccacgaatatgttcttcgtaactggcgtatcgtaaaagtcgcaacaacgaaagctcaacgtaaattatttttcaacctacgtaaaactaaacaacgtttaggttggttcaatgaaaatgaagttgatatggtcgcaaatgaattgggtgtttccaaagaagatgtgatcgaaatggagtctcgaatgagcggtgcggatgtcggttttgatttacctactgatgatgcagaaacagagacctattctccagccctttatttggaagataaaagttctaatttcgcagcagagctggaaaatgaaaactttgaaagccaagcaaccgagcaattaagtgcggcgctacaaagtctagatgcacgtagtcaggatattatcaaagctcgttggttagatgataacaaagccacattgcacgacttggcagcaaaatataatgtctctgcggaacgtattcgtcaattagaaactaatgcactgaaaaaattaaaaagtgcggtgaatttttaa

SEQ ID NO: 532 - protein, 281 aa, Haemophilus influenzae
MDKETQMMLVPQGSIEGYIRAANEYPMLTAEEEKELAERLYYHEDLDAAKKLILSHLRFVIHVARGYSGYGLPQADLIQEGNIGLMKAVKRFNPEVGVRLVSFAVHWIKAEIHEYVLRNWRIVKVATTKAQRKLFFNLRKTKQRLGWFNENEVDMVANELGVSKEDVIEMESRMSGADVGFDLPTDDAETETYSPALYLEDKSSNFAAELENENFESQATEQLSAALQSLDARSQDIIKARWLDDNKATLHDLAAKYNVSAERIRQLETNALKKLKSAVNF

SEQ ID NO: 533 - DNA, 279 bp, Haemophilus influenzae
gtgcgtgttattcttgcgcctatgcaaggggttctagatccctttgtacgcgaacttctcaccgaagtgaatgactacgatttatgtataacagaatttgttcgcgtagttgatcaacttctccctgaaaaagtattttatcgtttatgccctgaattaaaaaatcagggctttacttcttctggcacgcctgtgcgagtgcagttgctagggcagaatccagaatgccttggtgtgagattcaaaaaacctgctaatcagcaggttttctttttctaa

SEQ ID NO: 534 - protein, 92 aa, Haemophilus influenzae
MRVILAPMQGVLDPFVRELLTEVNDYDLCITEFVRVVDQLLPEKVFYRLCPELKNQGFTSSGTPVRVQLLGQNPECLGVRFKKPANQQVFFF

SEQ ID NO: 535 - DNA, 867 bp, Haemophilus influenzae
atggaatttattggaaaaattataggcgtatttttaggttggaaagttggtggattttttggtgcgatagctgggctcattttaggttctattgcagataaaaaattgtatgaacttggctcggtaagttctagtttctttaaaaagaaaacaacgcgtcaagacttgtttatgcaaacctcctttgcggtgttagggcatttaagcaaatcgaaagggcgtgtaacagaagaagatatccaattagctaatcaattaatgattcagcttaaactggatgatgcagggcgtaaattagcgcaagatgcgtttcgtcgtggtaaagaatctgatttcccgattcgtcaagttatccgtgaatttcgcattggttgtgggcaacgtgctgatttattgcgaatgttcttacaagtgcaagttcaagcggcttttgccgattcagaacttcacgaaaatgagaaagaagtgctttatgtgatcgctgaagaacttggtctttctcgtatgcaatttgaacaaatgattgcgatggaaatggctgctcgagcttttactcaaggcggtttttatcagcaatatcaacaaggtgcctatcaaggtggctaccaatatcagcaacaaaatagtggtggttaccaacatgcttctggcccaactttaaatgatgcctataaagtattgggtgtgactgagtccgacgagcaaaacacggttaagcgtgcttatcgtcgtttaatgaatgaacaccatccagataaactcgtggcgaaaggtttaccgccagaaatgatggaaatggcaaaagaaaaaactcaacagattcaagccgcttacgatttaatttgtaaagcaaaaggctggaaatag

SEQ ID NO: 536 - protein, 288 aa, Haemophilus influenzae
MEFIGKIIGVFLGWKVGGFFGAIAGLILGSIADKKLYELGSVSSSFFKKKTTRQDLFMQTSFAVLGHLSKSKGRVTEEDIQLANQLMIQLKLDDAGRKLAQDAFRRGKESDFPIRQVIREFRIGCGQRADLLRMFLQVQVQAAFADSELHENEKEVLYVIAEELGLSRMQFEQMIAMEMAARAFTQGGFYQQYQQGAYQGGYQYQQQNSGGYQHASGPTLNDAYKVLGVTESDEQNTVKRAYRRLMNEHHPDKLVAKGLPPEMMEMAKEKTQQIQAAYDLICKAKGWK

SEQ ID NO: 537 - DNA, 642 bp, Haemophilus influenzae
atggaacaatataaacgcgattttatcgaatttgctttaagccgaaatgtattgaaattcggcgagtttactttgaaatcggggcgtaaaagtccgtatttcttcaatgcgggtttgttcaatacgggggcagatttagcacgtttaggcgagttttatgctgcggcaattcaagcaagtgcggtagattttgatgtggtttttggccctgcttacaaaggtattccaattggcacgtcagtttcggtggcgttatttaatcgttatggtattgataaacccgtgtgttttaatcgtaaagaagtgaaagatcacggagagggcggcaatttaattggtagcccattgcaaggaaaaattttgcttgtggatgacgtgattacggctggcactgcaattcgtgaatctatggaattaatcagtgcaaatcaggcagaacttgcggcggtattgatcgctctaaaccgtaaggaacgaggaaaaggcgagctttcagcaattcaagaagtagaacgtgattatcaatgccaagtgctatcaatcattgatttagatgatttgatgcaatttatcgaacaagatcctcgatacagtagccatttgccagaaatgtgtgcttatcgtgccgaatttggcgtataa

SEQ ID NO: 538 - protein, 213 aa, Haemophilus influenzae
MEQYKRDFIEFALSRNVLKFGEFTLKSGRKSPYFFNAGLFNTGADLARLGEFYAAAIQASAVDFDVVFGPAYKGIPIGTSVSVALFNRYGIDKPVCFNRKEVKDHGEGGNLIGSPLQGKILLVDDVITAGTAIRESMELISANQAELAAVLIALNRKERGKGELSAIQEVERDYQCQVLSIIDLDDLMQFIEQDPRYSSHLPEMCAYRAEFGV

SEQ ID NO: 539 - DNA, 717 bp, Haemophilus influenzae
atgcgtccaaataatcgagaaaataatcaaccccgccaaattaaaattacccgtaactacaccaagcatgctgaaggttctgtgcttgttgaatttggtgataccaaagtgctttgtactgcaacagtggaagatgctgtaccacgtttcttaaaaggacaagggcaaggctgggtcacggctgaatacggaatgttgccacgttcaactcatagtcgtatgcaacgtgaggcggctaaaggtaaacaaggtggacgcacaatggaaattcaacgcttaattgcccgctctttgcgtgccatggtggatcttaaagcactgggtgaacgtgcgattactttagattgcgatgttattcaagcggatggaggcacacgaactgcatccattactggtgctgcagtcgcattatgtgatgcgatcaacggtttaattgagaatggcacgttaaaaactaaccccattaaagggctagtttcggcaatttctgtagggattgttgatggtcaagctgtttgtgatttggaatacgtggaagattctgcagcggaaaccgatatgaatgttgtgatgatggaagatggtcgaatgattgaggtgcaaggcactgcagaaggcgagccatttagccatgaagaattattaacattattagatttagcgaaacaaggctgtaatcaaatttttatcgctcaacgcaaagcgctaggcttataa

SEQ ID NO: 540 - protein, 238 aa, Haemophilus influenzae
MRPNNRENNQPRQIKITRNYTKHAEGSVLVEFGDTKVLCTATVEDAVPRFLKGQGQGWVTAEYGMLPRSTHSRMQREAAKGKQGGRTMEIQRLIARSLRAMVDLKALGERAITLDCDVIQADGGTRTASITGAAVALCDAINGLIENGTLKTNPIKGLVSAISVGIVDGQAVCDLEYVEDSAAETDMNVVMMEDGRMIEVQGTAEGEPFSHEELLTLLDLAKQGCNQIFIAQRKALGL

SEQ ID NO: 541 - DNA, 1443 bp, Haemophilus influenzae
atgaaactagatgctccttttaatttagatccaaatgtaaaagtgcgtactcgttttgctcctagccctacaggttatttacatgtaggtggcgcacgtaccgcactttattcttggttatacgcaaaacataataacggcgaatttgtattacgaattgaagacactgatttagagcgttcaacaccagaagccactgctgccattattgaaggcatggaatggctaaatcttccgtgggagcatggcccttattaccaaactaaacgctttgatcgttataaccaagtgatcgatgaaatgattgaacaaggcttagcatatcgttgttattgtactaaagaacacttagaagaacttcgtcatactcaagaacaaaataaagaaaaaccacgttatgaccgtcactgcttacacgatcacaaccattcacctgatgaaccccatgttgtacgttttaaaaatccaactgaaggctcggtagtatttgatgatgccgtacgtggccgtattgaaatcagcaacagtgagcttgatgatcttattattcgtcgcacagacggttctccaacttataacttctgcgtagttgtggatgactgggacatgggtatcacacatgttgtacgtggcgaagatcatatcaacaacacgcctcgtcaaattaacattttaaaagcgattggtgccccaattccaacctatgcacacgtttctatgattaatggcgatgatggtcaaaaactctctaaacgacatggtgcagtgagcgtcatgcaatatcgtgatgatggttacttaccagaagctttaattaactatcttgtgcgtttaggctggggacatggcgaccaagaaattttcagtcgcgaagaaatgatcaactatttcgaattagatcatgttagcaaatcagctagcgcatttaataccgaaaaattacaatggttgaatcaacattatatccgtgaattaccgccagaatatgtggctaaacaccttgaatggcattacaaagatcaaggcattgatacaagcaatggtcctgcattaactgaaatagtcaccatgcttgcggaacgttgcaaaaccttaaaagaaatggctagctcaagccgctacttctttgaagagtttgaaacctttgatgaagccgcagcgaaaaaacatttcaaaggcaatgctgctgaagcgcttgcaaaagtgaaagaaaaattaaccgcactttctagctgggatttacattctactcacgaagccattgagcaaacagctgctgaactagaagtgggcatgggtaaagttggcatgccattacgtgtcgctgtgacaggttctggtcaatcgccatcaatggatgttaccctagtcggtatcggcagagatcgcgtacttgcgcgtattcagcgtgctattgattttattcatacacaaaacgcttaa

SEQ ID NO: 542 - protein, 480 aa, Haemophilus influenzae
MKLDAPFNLDPNVKVRTRFAPSPTGYLHVGGARTALYSWLYAKHNNGEFVLRIEDTDLERSTPEATAAIIEGMEWLNLPWEHGPYYQTKRFDRYNQVIDEMIEQGLAYRCYCTKEHLEELRHTQEQNKEKPRYDRHCLHDHNHSPDEPHVVRFKNPTEGSVVFDDAVRGRIEISNSELDDLIIRRTDGSPTYNFCVVVDDWDMGITHVVRGEDHINNTPRQINILKAIGAPIPTYAHVSMINGDDGQKLSKRHGAVSVMQYRDDGYLPEALINYLVRLGWGHGDQEIFSREEMINYFELDHVSKSASAFNTEKLQWLNQHYIRELPPEYVAKHLEWHYKDQGIDTSNGPALTEIVTMLAERCKTLKEMASSSRYFFEEFETFDEAAAKKHFKGNAAEALAKVKEKLTALSSWDLHSTHEAIEQTAAELEVGMGKVGMPLRVAVTGSGQSPSMDVTLVGIGRDRVLARIQRAIDFIHTQNA

SEQ ID NO: 543 - DNA, 1656 bp, Haemophilus influenzae
atgatcgcttatattttcttagctttattcacgattgcggcagtgatttttattgtaaactcccattatcgttggacttatttctttgctattacgctttttacttttttatttggcggcatgcttatggtttccagccaatggcaacgtgctttaaatttttcatcagtgctttttgtggtactgatgttatttcatcgtttaaaaattcattattacaaacagcctttgttaatttcagatttctttcttgtggtagattggcgaaattgggaaaccttaattcattataaaggtgcgttgtttggcgttattgggctactggcgttattaggttatgcgatttttggttttaatgatgtcgagtctttaggggtattaggtagcagcattggtgctttattgtttatcgttagctttagcttgatgtggcattattctaaaaatccaagtgcggtgcaagtttggttagattctttgcccgatgatggtcgtgatgtgtttttaaatttaccaatgtcttgccgcggtatttttttcaaagtgccaaattttgatggcaatagccaaaattttattgaaaaaatgaccgcactttcatttgatacaaacaacctatctgaaacaaaacccgatattgttgtaacattaatggaatccacgctgaaccctcatcaatttgcttttagtcagcaatctattccaccactttccatgtttgagtctcaaagtgatacagtatttgcttcgccgttgcgtgtacatacttttgctggtgcaacgtggaaatcagaatttgcttttttagctggtgtaccttcaaccgattttggcgcgttagcaagtggcgttttttattctgttgtaccgcacttgcaatcaggtttagtgaaaaatctaaaagctcaaggatatttttgtgttgccttgtcgccttttacaaaaggtaattacaatgcgaaatccgcttatgatcacttcggttttgatttgatgttacagccgcaagatcttggttatcctgcacctatcagtaaaaatctttgggatattagtagtgaagaaatgatgaagtacacccgaatgattttggaaaaacagcatcctgcattagaaaatgtagatcagccaatgtttgtttatgtattgactatgcgtgaacatggcccatacgaattgggcatagaaaatatatttaatcttcaaatgcctaatttaggggctaaaagtatttctgcattgaatgactatactcaacgtattgtcgcattgaatgattcgattgaaggaatgaataactatttacaagaacgtaaaaagccttttgtgctaggttatttcggtgatcaccaagtggcatttgataatgctatccctccgaagaaaggggattatgcacagcccgattatgtgacacaatttgttgtaagaagtaattgtgcgagtcaatttaagcaagaacaaaagtttttagatcttgcttttgctggaggcgtcttgatgaatgtagctggattatcagcagaagatgaatttatgaaagcgaatatggcaatgtgcaaattgagtgatggcaaattagaagattcttctgatattcagctactcaatgattatcgccattatttatatcaaacattggcgattgccagataa

SEQ ID NO: 544 - protein, 551 aa, Haemophilus influenzae
MIAYIFLALFTIAAVIFIVNSHYRWTYFFAITLFTFLFGGMLMVSSQWQRALNFSSVLFVVLMLFHRLKIHYYKQPLLISDFFLVVDWRNWETLIHYKGALFGVIGLLALLGYAIFGFNDVESLGVLGSSIGALLFIVSFSLMWHYSKNPSAVQVWLDSLPDDGRDVFLNLPMSCRGIFFKVPNFDGNSQNFIEKMTALSFDTNNLSETKPDIVVTLMESTLNPHQFAFSQQSIPPLSMFESQSDTVFASPLRVHTFAGATWKSEFAFLAGVPSTDFGALASGVFYSVVPHLQSGLVKNLKAQGYFCVALSPFTKGNYNAKSAYDHFGFDLMLQPQDLGYPAPISKNLWDISSEEMMKYTRMILEKQHPALENVDQPMFVYVLTMREHGPYELGIENIFNLQMPNLGAKSISALNDYTQRIVALNDSIEGMNNYLQERKKPFVLGYFGDHQVAFDNAIPPKKGDYAQPDYVTQFVVRSNCASQFKQEQKFLDLAFAGGVLMNVAGLSAEDEFMKANMAMCKLSDGKLEDSSDIQLLNDYRHYLYQTLAIAR

SEQ ID NO: 545 - DNA, 810 bp, Haemophilus influenzae
gtgatttcattaaaaaattttggattattattttggaaacgtttttcagaaaataaacttaatcaagtcgctggcgcattgacttatagcacaatgttagcaatggttcctttagttatggttattttttctattttctctgcttttcctgtattcaatgaagtgacgggagaattaaaagaaatgatttttactaattttgcgccgtcagcgagtgatatggtgggcgaatatatcgatcaatttgtatcaaactcaaagaaaatgagtgcggtgggaattgtgagtttaattgccgttgccttgatgctaattaataacatcgaccgaacactaaatagtatttggcacaatagtcaatctcgctctccgctttcttcttttgcgatttattggatgattttgacacttggcccacttattattggcgtgagcattgggattagttcgtatattaaaataatgtttgagcaatcggaacatttatcattaggcttaaaattgctcagttttgtgccttttttatttacttggtttatttttacgcttatttatacggttgtaccgaataaaaaagtgaaaattaagcattcagcttacggtgcatttcttgccgcgatttttttcactcttggtaaacaagcatttacttggtatatcgtcacttttccctcttatcaattaatttacggtgcaatggcaactttaccaattatgttattgtggattcaaataagttggcttgtggtattagttggtgcgcaattagcttcaaccttagatgaaattggcgagcagatcgagcaataa

SEQ ID NO: 546 - protein, 269 aa, Haemophilus influenzae
MISLKNFGLLFWKRFSENKLNQVAGALTYSTMLAMVPLVMVIFSIFSAFPVFNEVTGELKEMIFTNFAPSASDMVGEYIDQFVSNSKKMSAVGIVSLIAVALMLINNIDRTLNSIWHNSQSRSPLSSFAIYWMILTLGPLIIGVSIGISSYIKIMFEQSEHLSLGLKLLSFVPFLFTWFIFTLIYTVVPNKKVKIKHSAYGAFLAAIFFTLGKQAFTWYIVTFPSYQLIYGAMATLPIMLLWIQISWLVVLVGAQLASTLDEIGEQIEQ

SEQ ID NO: 547 - DNA, 483 bp, Haemophilus influenzae
atgtcagaaatttcaaccgcactttcggaagattgtccatgtcaatctggtcatcattacgcagattgttgtggcaaatttcatttgagacaagcatttcccgaaacggcagaacaacttatgcgttcacgttatacagcttatgtgttaaaaaatataccttatattgttgtaacaactgtgccaagccaacaaactttattaaagcctaggttattgcaagaatgggctgacaacactacgtggctaggattagaaattctaaaaacggaaagccttacaaaaactcaaagtgcggtggaatttaaagctatttttcaaggcgaagaatgtgagcaagcccatcaagaacggtcaatttttgtgaaaattgaagatcgttggtattttgtggatccaacggtatctttgcctacaatgaaacaaccttgtgtatgtggttctggtaaaaaatttaaacattgttgtgggggatttctgtga

SEQ ID NO: 548 - protein, 160 aa, Haemophilus influenzae
MSEISTALSEDCPCQSGHHYADCCGKFHLRQAFPETAEQLMRSRYTAYVLKNIPYIVVTTVPSQQTLLKPRLLQEWADNTTWLGLEILKTESLTKTQSAVEFKAIFQGEECEQAHQERSIFVKIEDRWYFVDPTVSLPTMKQPCVCGSGKKFKHCCGGFL

SEQ ID NO: 549 - DNA, 663 bp, Haemophilus influenzae
atgaatgcaaaaattttagttataaaagtggggcaagttcaaaccctaaccttttccgatggaagccagtatgaaagtgcgattcgtaaaaaagttgtgccatcggtaaaaattcattctcttggtgcggaaggaaacgatgttggtttaaaaaaacatcacggtggtgtagataaagctctcttttttatgtcggcagattcttttaatgaattaaatactttattaaataaagatttttcttatatggatactgcgatatacggagaaaattttgtcgtgtcaggcttgaatgaagacaatgtatgtattggcgatcgttatcaaatcggctcaaccattttagaagtatctcaaccacgtaaaccttgtgagcgtttatcaaaaaacacggaaaacgaagagactcgcgatattgtttatcaaactgggctcagtggatggtatgttcgtattattgaaacaggaacaattaagcaaaaggatgaactaaaattactcgcccgtccttatccgcaaataacaattcgtcatttaaatcgcttgttatctgcaccaaaaaatgaagctgaattagatgccgcattagagattgaagtattagctgaagcctttaaacgctcaattcgatcgcaaatatcgaaattcaaacaacagggataa

SEQ ID NO: 550 - protein, 220 aa, Haemophilus influenzae
MNAKILVIKVGQVQTLTFSDGSQYESAIRKKVVPSVKIHSLGAEGNDVGLKKHHGGVDKALFFMSADSFNELNTLLNKDFSYMDTAIYGENFVVSGLNEDNVCIGDRYQIGSTILEVSQPRKPCERLSKNTENEETRDIVYQTGLSGWYVRIIETGTIKQKDELKLLARPYPQITIRHLNRLLSAPKNEAELDAALEIEVLAEAFKRSIRSQISKFKQQG

SEQ ID NO: 551 - DNA, 114 bp, Haemophilus influenzae
ttgaccgcacttctttttttacttattattcgttatcagaaaaacaaaaaagaaataatgaaaatgtttgaaagagaaaaaaattttctaaaaatattttatttcttttcttga

SEQ ID NO: 552 - protein, 37 aa, Haemophilus influenzae
MTALLFLLIIRYQKNKKEIMKMFEREKNFLKIFYFFS

SEQ ID NO: 553 - DNA, 759 bp, Haemophilus influenzae
atgtcagacgtatttcacttaaacctcactaaagcgcaacttaaaggtgcaacactcgctattgttcctggcgatcctgcccgcagtgagcgtattgcgaaacaacttgataatccagagtttcttacaagcacgcgtgaatttacatcgtggttaggttatatcaatggtcagcctattgttgtatgttctacgggtattggtggcccatcaacatcaatttgtgtggaagaacttgctcaacttggtgttcgcactttcttacgtattggcacaacgggtgcaattcaaccgcacattaatgtaggcgatgtccttatcacaaccgctgctgttcgcttagatggtgcaagccatcattttgtaccattagaatatccagctgtggcaaactttgaatgtacaaccgcactttataatgcagcgaaagcaaaaggtattgagccttatgtaggtgtaaccgtatcatctgatacattctatccaggtcaagaacgttacgatacttatagtggtaaagtatatcgtaattaccaaggtttgcttaaacaatggcaagatttgaatgtcatgaattacgaaatggaatcttcaacattgtttactatgtgtagtgcattaggtttgcgtgcaggaatggttgcaggcgtgattgtaaaccgcactcaacaagaaattccaaatgaagcaacgataaaacaaacagaagaaaaagctgtgtctgttgtgatcgcagctgcacaagcgttgttaagttaa

SEQ ID NO: 554 - protein, 252 aa, Haemophilus influenzae
MSDVFHLNLTKAQLKGATLAIVPGDPARSERIAKQLDNPEFLTSTREFTSWLGYINGQPIVVCSTGIGGPSTSICVEELAQLGVRTFLRIGTTGAIQPHINVGDVLITTAAVRLDGASHHFVPLEYPAVANFECTTALYNAAKAKGIEPYVGVTVSSDTFYPGQERYDTYSGKVYRNYQGLLKQWQDLNVMNYEMESSTLFTMCSALGLRAGMVAGVIVNRTQQEIPNEATIKQTEEKAVSVVIAAAQALLS

SEQ ID NO: 555 - DNA, 1317 bp, Haemophilus influenzae
atgtctacacaacttcgtaataatccgatgaaagtggcgttagcctcgatggtcggtacagcaattgaattttttgattattatatttatgcggctgccgctgtattagttttcaatacgcaattctttcatagcgatgatccgctttctaatgatttactttctctttctacgcttgctttagcattttttgcacgccctattggttcggcattattcggtcactttggcgataaaattggtcgtaaaaaaaccttggttgcctctcttgttttaatgggtggttcaacggtagtaattggtttacttcctaattatgctcaaattggtatctgggcgccgattttgctttgtgtatgtcgcgtaggtcaaggaattggacttggtggagaatggggaggtgcagcgttagtcgcaacagaaaatgcaccaaaaggaaaacgagcttggtacggtacttttcctcaattaggcgcaccaattggtttatttgtcgctaatggaacgttcttcttagttagctatttgcttggtcataatgcacttgttgaatgggcgtggcgtattccatttgtatcttccattttattagttgcagttggtttatatgttcgcttaactttgcacgaaagccacgtatttgtggaagcagagcaaaaaggcaaaaaattgaatgcaccagtgagtgttgtgtttaccaaacacttaaaaccaatgatcattggtacatttattatggtggcaacttattctctgttttacattatgacggcttttgcgcaggcatattctcgaacagcaccaaagctttctgaagcaggttatgcgcttggcttaggtatcccagcaaatacatttactggcttgttattaattagtgccattgtatttggtatttttatcagtatttccggtttttatgccgataaaatcggtcgtcgtaaatggttgatttgggtgactattgctatcggcgtgcttggtttagcaatgccgttattcttagaaaatggcactccagttagcgtatttgcatttttagtgattggtatggcgattatgggaatgacatttggtccaatggctgcgctattaccagaattattcccaacagaagtccgttattcaggtgcctctcttgcgtataatttagcatcaattattggtgcaacaattgcagcaatgatttctttaaaaattaacgcgtcattcggtgtaatgggcgtaggaatttatttagcaatcaatgcattaatgactttcttggcattattagcctcaaaagagactaaaaatgtagatttaacagaaatctaa

SEQ ID NO: 556 - protein, 438 aa, Haemophilus influenzae
MSTQLRNNPMKVALASMVGTAIEFFDYYIYAAAAVLVFNTQFFHSDDPLSNDLLSLSTLALAFFARPIGSALFGHFGDKIGRKKTLVASLVLMGGSTVVIGLLPNYAQIGIWAPILLCVCRVGQGIGLGGEWGGAALVATENAPKGKRAWYGTFPQLGAPIGLFVANGTFFLVSYLLGHNALVEWAWRIPFVSSILLVAVGLYVRLTLHESHVFVEAEQKGKKLNAPVSVVFTKHLKPMIIGTFIMVATYSLFYIMTAFAQAYSRTAPKLSEAGYALGLGIPANTFTGLLLISAIVFGIFISISGFYADKIGRRKWLIWVTIAIGVLGLAMPLFLENGTPVSVFAFLVIGMAIMGMTFGPMAALLPELFPTEVRYSGASLAYNLASIIGATIAAMISLKINASFGVMGVGIYLAINALMTFLALLASKETKNVDLTEI

SEQ ID NO: 557 - DNA, 744 bp, Haemophilus influenzae
atgataaacatcatttttcttcacggacttcttggtacaaaaaatgactggcaaaaagtcattgaaaatctaccgcactttaattgtattgcgctagatttgccttttcacgggcaagctaaagaccttgaagtcacaaattttgaagaaacggctgagtatttggctcagcaaattaaaagtgcggtgaaaaatgaaccctattttcttgttgggtattctctaggtggcaggattgctttgtattatgcgctgcaagctcaggtggaacgatctaatttgcaaggcgttattttagaaggagcgaatctaggtttaaaaactgacgaagaaaagcaggctcgttttcagctggattttgcgtgggcgcaacgttttatgcaagaatcgccagaagatgtattaaatgattggtatcaacaacctgtgttttcccatttgactacagaagaaagattacagttggttgaaaaacgaaaatcaaattgtggggaaaatattggcaaaatgttgctggcgacaagtctatccaaacaacctgattttagtgaaaaagtgcggttaagttctttgccatttttttatttttgtggcgaaagagatcataagttccaagtattagccaaagaaaatcaaattgatttagtgacaattccctgcgctgggcataactcacatttagaaaattcaaaatatttctctaaaaaaatagaaaattgcatattaaaaattgttagaacttag

SEQ ID NO: 558 - protein, 247 aa, Haemophilus influenzae
MINIIFLHGLLGTKNDWQKVIENLPHFNCIALDLPFHGQAKDLEVTNFEETAEYLAQQIKSAVKNEPYFLVGYSLGGRIALYYALQAQVERSNLQGVILEGANLGLKTDEEKQARFQLDFAWAQRFMQESPEDVLNDWYQQPVFSHLTTEERLQLVEKRKSNCGENIGKMLLATSLSKQPDFSEKVRLSSLPFFYFCGERDHKFQVLAKENQIDLVTIPCAGHNSHLENSKYFSKKIENCILKIVRT

SEQ ID NO: 559 - DNA, 1707 bp, Haemophilus influenzae
atgtcggtaagcgtgtttaatcgttgttggtcgaaagtgattttagaaaccttggtgcgccaaggcgtttctcacgtttgtatcgcgccaggttcgcgttcgacacctttaactctagaagccgtacgtttgcaaaatgcaggttcagtcacttgtcatacgcattttgatgaacgcggtttaggtttttttgctttgggtattgctaaggcaactcaatcgcctgttgcaattattgttacatcaggtactgcaacagcaaacctttatccagcaattattgaagcacgccaaactggtgtgaatttatttgttttaactgctgatcgtccaccagaactttgggagtgcggtgcaaatcaagctattttgcaacaaaatatgtttggtcagtatccagttgcaaatgttaatttacctaaaccgaacgctgattattctgcacaatggttgatttctctacttgaacaggcagctttccaacaaaaacaacaaggtggcgttgttcatattaatgtcccatttgccgagccactttatgatgcaactgatgaggaagtaaattcccatagttggctacatccgttacaacgctggttaattcaaaacaagtcttggataaatgtagaagtccaacaaaacgaagtattaatgcatgaaaattgggatcattggcgtaccaaacgtggtgtcgttgtggttggtcaattacctgcagaacaagcgatgggcattaattcttgggcaagtgctatgggctgggtgttactgacggatattcaatctggtgttgttccaacgacaccttatgaagatatttggctagcaaaccaaactgttcgtgaaaaacttctacaagctgatattgtgattcaatttggcgcgcgttttattagtaaacgcattaatcaattcttgcaagcgtttaaaggggaattttggctagttgaacaaagcggtaaagcattagatccttaccatcattcattgacaagattcaatgctaaagcgcatcattggttgcgtgcacatccacctttacgccaaaagccttggttgcttgagccgttagctttatctaagttctgtgcgacctttattgaacagcaagtaggtggaaatttaacggaagcctcgctcgcattacgtttaccaacacttttaccttataacggtgttttatttttaggtaatagtttacttgttcgtctagttgatgcgctaacgcaattaccagaaagttatcccgtttataccaatcgtggtgcgagtggaattgatggtttgttggctactgctgctggaataggtattggttcaaataaacctgttgttgcggtgattggcgatacgtccactttatatgatttgaattctttcgcattattcaaaaacgttacgcaaccaacgctaatctttgtgatcaataataatggtggcgcgatttttgatatgttacctgtggatgaacaagtcaaagatcagttctatcgattaccgcataatggcgatttttctcaaatcgcggcaatgttcgatcttaaatacgctcatccttatacttgggcagatctcaattctgttgtgaaacaggcttatagtcgtcgcaaggcaacgttaattgaaattaaaacgaatccgagtgatggtagcagtttgtataaacgcttaatcgagcaaattagtcacgccgtgattggtgcttaa

SEQ ID NO: 560 - protein, 568 aa, Haemophilus influenzae
MSVSVFNRCWSKVILETLVRQGVSHVCIAPGSRSTPLTLEAVRLQNAGSVTCHTHFDERGLGFFALGIAKATQSPVAIIVTSGTATANLYPAIIEARQTGVNLFVLTADRPPELWECGANQAILQQNMFGQYPVANVNLPKPNADYSAQWLISLLEQAAFQQKQQGGVVHINVPFAEPLYDATDEEVNSHSWLHPLQRWLIQNKSWINVEVQQNEVLMHENWDHWRTKRGVVVVGQLPAEQAMGINSWASAMGWVLLTDIQSGVVPTTPYEDIWLANQTVREKLLQADIVIQFGARFISKRINQFLQAFKGEFWLVEQSGKALDPYHHSLTRFNAKAHHWLRAHPPLRQKPWLLEPLALSKFCATFIEQQVGGNLTEASLALRLPTLLPYNGVLFLGNSLLVRLVDALTQLPESYPVYTNRGASGIDGLLATAAGIGIGSNKPVVAVIGDTSTLYDLNSFALFKNVTQPTLIFVINNNGGAIFDMLPVDEQVKDQFYRLPHNGDFSQIAAMFDLKYAHPYTWADLNSVVKQAYSRRKATLIEIKTNPSDGSSLYKRLIEQISHAVIGA

SEQ ID NO: 561 - DNA, 1071 bp, Haemophilus influenzae
gtgcagtcattttcacagttaaatttagcacaagagtttattgaagaaagtggttttccactggtcggcggtttgcaatttcaaggcactgcacaatttgtattacccaaaatgcttgttgaacaggataataaaggcacgttggtatccttttttgtgaaagatgagcaaagtgcgaatgatactttagcccacctcaaaacttttgaaaatctcaccgcactttctgcgttgccaaaacaaattcctttgcatacagagcctcgagctaatgaaagaacttggtgtgattgggtcaatcaggctttggtagaaattaaaagtggagagctgacaaaaattgtgttagccaatgaaaccacttttcatttaaagcaagcgattaatgcgtacgattttttagcagaaagcgaaaaacaaaatcaaggttgttatcattttttatgggctgaaaattttcattcggtttttgttggttctacgccagaacgcctatttgctcgtgagtataatttgttgctaacagaggctttggcggggacagcatcagtttctgaaagtgaggaagaaacgcaatctcaagccaattggttattaaatgacgagaaaaatttaaaagaaaattggttagtcgtaaaagatatttcgcagaatttacgtaagcaagtagaaagttttgatgtaagcaatgtggaattgaaaccgttacgtaaagtacaacatttgattcgtaaaattcgtgcaaatttgaccgcacattatgcagatgtaaatatattaaaagcgattcatcctacggctgcagtatctggtttgccacagcaacaagccaaaatgattttgtcagaaatcgaaacctttgatcgaggctggtatgcgggaacattgggcgtgatgagcgatgtatgttcagagttttgtgtggcgattcgttctgcttttattgaaggtcatcgtattcgtgtatttgctggcgcgggcattgtggcaggctcgcagccattggaagaatggaaagaaattgaacgtaaagcagcagggttaatttccttgtttgcagaagaaaaatga

SEQ ID NO: 562 - protein, 356 aa, Haemophilus influenzae
MQSFSQLNLAQEFIEESGFPLVGGLQFQGTAQFVLPKMLVEQDNKGTLVSFFVKDEQSANDTLAHLKTFENLTALSALPKQIPLHTEPRANERTWCDWVNQALVEIKSGELTKIVLANETTFHLKQAINAYDFLAESEKQNQGCYHFLWAENFHSVFVGSTPERLFAREYNLLLTEALAGTASVSESEEETQSQANWLLNDEKNLKENWLVVKDISQNLRKQVESFDVSNVELKPLRKVQHLIRKIRANLTAHYADVNILKAIHPTAAVSGLPQQQAKMILSEIETFDRGWYAGTLGVMSDVCSEFCVAIRSAFIEGHRIRVFAGAGIVAGSQPLEEWKEIERKAAGLISLFAEEK

SEQ ID NO: 563 - DNA, 414 bp, Haemophilus influenzae
atgactgcactgccccaagcgcagccagtgctttttcttcatcacgaaaatgtaaataaaattgaggatacgcagattgacctttcagccacgccaacaaatcgaccttgtccagttttacctgaaaacggacaagttcactcgttgattgctgtaaatatgcgtgaatttgcgattttaactcgcctattgcctgcgctaaataactcattagattttgttttaaatacacaaaaaattagccgtattctaccgcagattgttaatgacaaaaaatttttttacaaaatcttttcaatattaaaaattcagcgtaaattaaccgcacttttctcgaaaaatttattagaaacaaaaggatttcactatgcgattattcccaaaatccgacaaattagaacacgtatgttatga

SEQ ID NO: 564 - protein, 137 aa, Haemophilus influenzae
MTALPQAQPVLFLHHENVNKIEDTQIDLSATPTNRPCPVLPENGQVHSLIAVNMREFAILTRLLPALNNSLDFVLNTQKISRILPQIVNDKKFFYKIFSILKIQRKLTALFSKNLLETKGFHYAIIPKIRQIRTRML

SEQ ID NO: 565 - DNA, 1050 bp, Haemophilus influenzae
gtggacgtattgcgtaatttgccgtcagctcaaggctactgtgattcaaaaggtttatattctgctcgtaaagccattgttcaatattatcaatcaaaagggattcacggcgcgaccgtcaatgatgtgtatattggtaacggcgtatctgagcttatcacaatggccatgcaagcattactcaatgatggtgatgaagtactcgtgccaatgcctgattatccgctttggactgctgcggtaacactttctggcggcaaggctgttcattacctttgtgatgaagaagcaaattggttccccgctattgatgatattaaagcgaaagtgaatacgaaaactaaagcgattgtcatcatcaacccgaacaacccaacgggtgctgtgtatagcaaagaattattacaagaagttgtggaaatcgcgcgccaaaataatttgatcatctttgcagacgaaatctacgacaaaattttatatgatggcgcagtgcatcatcacattgccgcactagctcctgatttattaaccgttacattgaatgggttatcaaaagcttatcgagttgcaggcttccgtcaaggttggatgattttaaacggcccaaaacataatgcgaaaggttatattgaaggcttggatatgctggcatcaatgcgtttatgtgccaacgtaccaatgcaacatgcaattcaaactgcacttggtggctatcaaagtattaatgaatttattttaccaggtggtcgattacttgagcaacgaaacaaagcctacgatctcatcactcaaattccaggcattacttgcgtgaaaccaatgggggcgatgtatatgttcccgaaaattgatgtgaaaaaattcaatattcacagtgatgaaaaaatggtgctggatttactccgccaagaaaaagtactacttgtgcacggtaaaggatttaattggcattcacctgatcacttccgtgttgtcacccttccttatgtgaatcagcttgaagaagccattacaaaattagcaagatttttgtcggattaccgtcaataa

SEQ ID NO: 566 - protein, 349 aa, Haemophilus influenzae
MDVLRNLPSAQGYCDSKGLYSARKAIVQYYQSKGIHGATVNDVYIGNGVSELITMAMQALLNDGDEVLVPMPDYPLWTAAVTLSGGKAVHYLCDEEANWFPAIDDIKAKVNTKTKAIVIINPNNPTGAVYSKELLQEVVEIARQNNLIIFADEIYDKILYDGAVHHHIAALAPDLLTVTLNGLSKAYRVAGFRQGWMILNGPKHNAKGYIEGLDMLASMRLCANVPMQHAIQTALGGYQSINEFILPGGRLLEQRNKAYDLITQIPGITCVKPMGAMYMFPKIDVKKFNIHSDEKMVLDLLRQEKVLLVHGKGFNWHSPDHFRVVTLPYVNQLEEAITKLARFLSDYRQ

SEQ ID NO: 567 - DNA, 1218 bp, Haemophilus influenzae
atgatcattgcaggtacagcgattggtgcaggcatgctggctaacccaacttcaacggcaggtgtatggtttatcggttcaattcttgctttaatttatacttggttttgtatgacaacctcaggattaatgatcctagaagctaatctacattatccaacaggttcaagttttgacactatcgttaaagatttattaggaaaaagttggaatattatcaacggtctttctgttgctttcgtcttgtatattttgacttatgcctacataacctcaggcggaggcattacacaaaatctgctcaaccaagcattcagttctgctgaaagtgcggtagatattgggcgaacttcaggatctttaattttctgccttattcttgcagcctttgtatggctttcaaccaaagcagtggatcgtttcacaaccgtgttaattgtcgggatggtggttgcttttttcctttctactactggtttattaagctctgtaaaaacagcagttttattcaataccgttgctgaaagtgagcaaacatatttaccttatttattgaccgcacttccagtttgtctcgtgtcgtttggtttccacggaaatgtcccgagtctcgtcaaatattacgatcgtgatggtcgtcgcgtgatgaaatcgatctttattggtacgggcttagcattagtgatttacatcttatggcagctcgctgtacaaggtaatttaccacgcactgaatttgcgccagtcattgaaaaaggcggcgatgtttctgcattattagaggctttacataaatatattgaagtggaatacctttccgtcgcattaaatttctttgcttatatggcaatttctacttcattcttaggcgtcactttagggttatttgactatattgcggatctatttaaatttgacgatagcttattgggcagaacaaaaacaacacttgttacttttttaccgccattattgctaagcctgcaatttccttatggatttgtgattgccattggttacgctggattggcggcaacaatttgggctgcaattgtccccgcacttcttgccaaagcaagccgtcaaaaattcccacaagcaagttataaagtatacggcggaaattttatgattggttttgtaatgttatttggcatattaaatattgtggcgcaaattggggcaaacttaggttggtttgcaagttttactgggtaa

SEQ ID NO: 568 - protein, 405 aa, Haemophilus influenzae
MIIAGTAIGAGMLANPTSTAGVWFIGSILALIYTWFCMTTSGLMILEANLHYPTGSSFDTIVKDLLGKSWNIINGLSVAFVLYILTYAYITSGGGITQNLLNQAFSSAESAVDIGRTSGSLIFCLILAAFVWLSTKAVDRFTTVLIVGMVVAFFLSTTGLLSSVKTAVLFNTVAESEQTYLPYLLTALPVCLVSFGFHGNVPSLVKYYDRDGRRVMKSIFIGTGLALVIYILWQLAVQGNLPRTEFAPVIEKGGDVSALLEALHKYIEVEYLSVALNFFAYMAISTSFLGVTLGLFDYIADLFKFDDSLLGRTKTTLVTFLPPLLLSLQFPYGFVIAIGYAGLAATIWAAIVPALLAKASRQKFPQASYKVYGGNFMIGFVMLFGILNIVAQIGANLGWFASFTG

SEQ ID NO: 569 - DNA, 1368 bp, Haemophilus influenzae
atgattagcgtatttgatatgtttaaagtgggaattgggccatccagttcccacacggtcggtccgatgaaagcgggtaaacaatttatagacgacttaattaaacgaaatcaatttgaacaaactactgaaattcacgtagatgtgtacggttctctttcaatgacaggacgaggacacagtacagatattgccattattatggggttagcgggttatttaccacataatgtggatattgatatgatttcaggtttcatcgagaaagttaaacaaactgcgcttttacccattaatgtcggtcaaaagatagtaaaatttgattttgaaaataatctcattttccaccgcacttttttaaaattgcacgaaaatggcatgacaattaccgctcttgatgaaaatcgcacagagctttatcgccaaacctattattcgattgggggtggttttattgtcgatgaaacccattttggcaaagaagaaaaaaacacagtccaagtgccttatccttacaaaaatgccgaagatattttgaaacattgtagtgataacggcttaatgctttccactgtgatgttggaaaatgaaatcgcattgaatggcaaagaggctgttagtgctcatctagagaatgtctggaaaacgatgcaggcttgtattgaacacggtattcacacagagggtattttacctggcccattaagagtaccacgtcgtgcagcttcactttatcgtgcgttgcaagcaaatacgaatttatctaacgatccaatgcgcgtaatcgactgggtcaatatgtttgcgcttgctgtcaatgaagaaaatgcagcgggcgggcgcgtggttacggcaccaactaacggtgcgtgcgggattattccagcggtattagcttactacgaaaaattcatctcgccattaacacctgaaatcattgaacgctatttattagccgcagggatgattggttcactttataagatgaacgcttctatttctggtgcagaagtgggttgtcaaggcgaagtgggtgtagcctgttcaatggctgctgcgggactagctgaaattttgggtggcaatccactacaagtatgcatcgcagctgaaattgcaatggagcataatttaggattaacttgcgaccctgtcggcggtcaagttcaagtaccttgtatcgaacgcaatgcgattgcttcagttaaagcgatcaatgcatcgcgtatggctttacgccgcaccaccaatccaagagtaagcttagataaagtgattgaaacaatgtacgaaacaggtaaagatatgaacgccaagtatcgcgaaacatctcaaggcggacttgcagttaaaattgtttgtaactaa

SEQ ID NO: 570 - protein, 455 aa, Haemophilus influenzae
MISVFDMFKVGIGPSSSHTVGPMKAGKQFIDDLIKRNQFEQTTEIHVDVYGSLSMTGRGHSTDIAIIMGLAGYLPHNVDIDMISGFIEKVKQTALLPINVGQKIVKFDFENNLIFHRTFLKLHENGMTITALDENRTELYRQTYYSIGGGFIVDETHFGKEEKNTVQVPYPYKNAEDILKHCSDNGLMLSTVMLENEIALNGKEAVSAHLENVWKTMQACIEHGIHTEGILPGPLRVPRRAASLYRALQANTNLSNDPMRVIDWVNMFALAVNEENAAGGRVVTAPTNGACGIIPAVLAYYEKFISPLTPEIIERYLLAAGMIGSLYKMNASISGAEVGCQGEVGVACSMAAAGLAEILGGNPLQVCIAAEIAMEHNLGLTCDPVGGQVQVPCIERNAIASVKAINASRMALRRTTNPRVSLDKVIETMYETGKDMNAKYRETSQGGLAVKIVCN

SEQ ID NO: 571 - DNA, 1239 bp, Haemophilus influenzae
atgaaatcaacagaaaaactcaaatggaacaaatttgatgcaacatggatgttaaaccttttcggtacggcggttggcgcgggcgtattgttcttgccgattaacgcagggatgggtggattttggccgttagttttaatggcaattatcgtcgggccaatgacttattttgctcaccgtggcttagcttattttgtgctttcatctaaaaagcctggcagcgatattactgaagtagtggaagaacactttggtaaaaccgctggtaaacttattaccttactttattttttcgcaattttccctattctgttaatttacggtaacggtatcacgaacaccgtagattctttcattgtaaatcaacttggtatggcatcgccaaatcgagttattctctcttttgtattaattgcggtattgatttccgtgatgttatttaatgaaaaagtgatgttaaaaatcacagaatggcttgtttacccgttagtcttaattttatttgttctttctatttacttaattcctgaatggaatagtgccgtattatatgaatttccaacagcaggtggtttcttaaccactttatggctaaccattcccgtattagtattttcatttaaccattcgccagcgacttcatcgttcacttgctcacaattccgtgaatacaaaacgtttgagggcgcagaacgccatatcagccatacagaaaaaggcgcttcaacgattttattattcttcgtaatgttcttcgtatttagctgtgtattaacactaacacctgaagaattagtggcagcaaaagaacagaatattagtatcttgtctttcttagcaaataaatttgataatccatatatctcttattttggcccgcttgttgcattcttagcaattacaagttcattcttcggtcactatatgggggcacgtgaaggattagaaggcttatatttgaaaatgaaaggcgaatctgtaaatcgtaaaaaactcaattatgcgaccgcacttttcttcttattaaccttatggggcgttgcgattattaatccaagtatcttaggcttaattgaatctcttggcggcccaatcattgcgatgattttattcattatgccaatgtatgcgattcgcaaaatcccagcaatgaaacgctacagcggacatttcagtaatgtatttgtaacaattatgggactaattgctatttctgcagttgtttatggattattataa

SEQ ID NO: 572 - protein, 412 aa, Haemophilus influenzae
MKSTEKLKWNKFDATWMLNLFGTAVGAGVLFLPINAGMGGFWPLVLMAIIVGPMTYFAHRGLAYFVLSSKKPGSDITEVVEEHFGKTAGKLITLLYFFAIFPILLIYGNGITNTVDSFIVNQLGMASPNRVILSFVLIAVLISVMLFNEKVMLKITEWLVYPLVLILFVLSIYLIPEWNSAVLYEFPTAGGFLTTLWLTIPVLVFSFNHSPATSSFTCSQFREYKTFEGAERHISHTEKGASTILLFFVMFFVFSCVLTLTPEELVAAKEQNISILSFLANKFDNPYISYFGPLVAFLAITSSFFGHYMGAREGLEGLYLKMKGESVNRKKLNYATALFFLLTLWGVAIINPSILGLIESLGGPIIAMILFIMPMYAIRKIPAMKRYSGHFSNVFVTIMGLIAISAVVYGLL

SEQ ID NO: 573 - DNA, 2169 bp, Haemophilus influenzae
atgctggatttgacgccacagagtaaaaaaatttcgattcagattggtgggatgacctgccaatcttgtgccaatcgcattgaaaaagttttaaataaaaaaccatttgtgcaacaagcgggagtgaattttgccgtcgaagaagcacaagttgtatttgacgctacgcaagcaagcgaaactcaaattatcgagattatccataaaacaggtttctctgcccatatcaaacaaaccaacgaattaccaatagaaaaaaatacatcaatcccttggcgattaatcgtactttggataatcaatattccatttctgattggtatgcttggcatgatgagtggctcacatcacttgatgttaccgccgatttggcaatttgcattagcaagcattgtgcaactttggttagccattccattttatcgcggagcaatcggtagtattcgtggtggacttgccaatatggatgtccttgtcagcacaggaacgctcactatttatctttattctgcttttatgctgttttaccacgccgatcatgcaatggggcatgtgtattttgaagcttctgtaatggtaattggttttgtcagtcttggaaaatttcttgaagatcgcactaaaaagcacagcctaaatagtttgagtatgctcttgcagctgacaccgaaaaaagtcactgttttacgtaatgaaaaatggactgaaattgctcttgaccaattcaatatcggcgaaatcattcgtgcgaatcaaggcgaacgtattgcggcagacggcataattgaaagtggaaatggatggtgtgatgaaagccatttaacgggcgagtctcgtccagaagaaaaacagaaaggtggaaaagtattagcgggggcgatggtaacagaaggttctattatctatcgagcaaatcagcttggtagccaaaccttacttggcgatatgatgaatgcattatcagatgcacaaggttcaaaagcacccattgctcgatttgctgacaaagttgcttccgtgtttgttcctgtcgttttagtgatttcacttgttactttcgcactcacttatattctgacgaatgatagtgtgtcttcactaattcacgcggtatccgtgcttgtgattgcttgcccttgtgccttgggattagccacaccagcagccataatggttggtttaggtaaagcagtcaatgctggcgtatggtttaaagatgcggctgcaatggaggaaaccgcccacgtggataccgttgtacttgataaaactggcacattaacaaaaggagagcttgaaatctctgctttatggcagccacaaagtgcggtgtattctgaagacgatttgtatcgttttgcagcagcagttgaacgacaagctaaccacccaattgcaaaagctattgtgcaagcagcagaacaaaaaatgttagaaattcccaccgcacttttttcaaagatggaagtgggtcaaggcattcaagccgaattagaacaagtgggaacaataaaagtcggtaaacctgattattgcggtttaatcttgcctaaaaatttagaggatatttggcaaattgcgagcattgtcgcagtatccataaatgatgaacccatcggtgcatttgcactgacggatactttaaaaaacgatagcttgcacgccattcaacgcttacaacagcaaaatattgatgtcgtaattatgagtggcgatcaacaatctgtggtggattacatagcaaaacagctcggcattaagaaagcctttggtggactcagtcctagagataaggcggaacaaatccaaaagctgaaagctcaaggtcatattgtcgcaatggtaggcgatggaataaatgatgcgcctgctttagccgcggcaaacgtcagttttgcgatgaaatcaggttcagatattgcagaacaaactgcctctgcaacgcttatgcaacattcggtgaatcaacttgtggatgcactttttattgcaatagcaaccttgaaaaatatcaaacaaaatctattttttgctttgatttacaatattctcggcataccccttgcagctttcggttttcttagccctataatcgctggtgctgctatggcgttgagctcaatttccgtattgatgaacgccttaagattgaaaaaagtgcggttctaa

SEQ ID NO: 574 - protein, 722 aa, Haemophilus influenzae
MLDLTPQSKKISIQIGGMTCQSCANRIEKVLNKKPFVQQAGVNFAVEEAQVVFDATQASETQIIEIIHKTGFSAHIKQTNELPIEKNTSIPWRLIVLWIINIPFLIGMLGMMSGSHHLMLPPIWQFALASIVQLWLAIPFYRGAIGSIRGGLANMDVLVSTGTLTIYLYSAFMLFYHADHAMGHVYFEASVMVIGFVSLGKFLEDRTKKHSLNSLSMLLQLTPKKVTVLRNEKWTEIALDQFNIGEIIRANQGERIAADGIIESGNGWCDESHLTGESRPEEKQKGGKVLAGAMVTEGSIIYRANQLGSQTLLGDMMNALSDAQGSKAPIARFADKVASVFVPVVLVISLVTFALTYILTNDSVSSLIHAVSVLVIACPCALGLATPAAIMVGLGKAVNAGVWFKDAAAMEETAHVDTVVLDKTGTLTKGELEISALWQPQSAVYSEDDLYRFAAAVERQANHPIAKAIVQAAEQKMLEIPTALFSKMEVGQGIQAELEQVGTIKVGKPDYCGLILPKNLEDIWQIASIVAVSINDEPIGAFALTDTLKNDSLHAIQRLQQQNIDVVIMSGDQQSVVDYIAKQLGIKKAFGGLSPRDKAEQIQKLKAQGHIVAMVGDGINDAPALAAANVSFAMKSGSDIAEQTASATLMQHSVNQLVDALFIAIATLKNIKQNLFFALIYNILGIPLAAFGFLSPIIAGAAMALSSISVLMNALRLKKVRF

SEQ ID NO: 575 - DNA, 207 bp, Haemophilus influenzae
atgaaaactatcacattaaacataaaaggcatacattgcggctgttgcgtaaaaagtcttactcaagttttaactgaattagatggtgtacaatctgctgatgtgcaattagagggtaaagcaaatattacttttgatgaaaatcgaatcaatgttgcacagctgattgaggtcattgaagatgctggatttgacgccacagagtaa

SEQ ID NO: 576 - protein, 68 aa, Haemophilus influenzae
MKTITLNIKGIHCGCCVKSLTQVLTELDGVQSADVQLEGKANITFDENRINVAQLIEVIEDAGFDATE

SEQ ID NO: 577 - DNA, 207 bp, Haemophilus influenzae
atgaaaactatcacattaaacataaaaggcatacattgcggctgttgcgtaaaaagtcttactcaagttttaactgaattagatggtgtacaatctgctgatgtgcaattagagggtaaagtaaatattacttttgatgaaaatcgagtcaatgttgcacagctgattgaggtcattgaagatgctggatttgacgccacagagtaa

SEQ ID NO: 578 - protein, 68 aa, Haemophilus influenzae
MKTITLNIKGIHCGCCVKSLTQVLTELDGVQSADVQLEGKVNITFDENRVNVAQLIEVIEDAGFDATE

SEQ ID NO: 579 - DNA, 207 bp, Haemophilus influenzae; identical to SEQ ID NO: 577

SEQ ID NO: 580 - protein, 68 aa, Haemophilus influenzae; identical to SEQ ID NO: 578

SEQ ID NO: 581 - DNA, 207 bp, Haemophilus influenzae
atgaaaactatcacattaaacataaaaggcatacattgcggctgttgcgtaaaaagtcttactcaagttttaactgaattagatggcgtacaatctgctgatgtgcaattagagggtaaatcaaatattacttttgatgaaaatcgagtcaatgttgcacagctgattgaggtcattgaagatgctggatttgacgccacagagtaa

SEQ ID NO: 582 - protein, 68 aa, Haemophilus influenzae
MKTITLNIKGIHCGCCVKSLTQVLTELDGVQSADVQLEGKSNITFDENRVNVAQLIEVIEDAGFDATE

SEQ ID NO: 583 - DNA, 387 bp, Haemophilus influenzae
atgaatattagtgaagccgcaaaattagtaggtttatccaccaaacaaatccgtgattatgaaaaaatagggttaattaaacccgctgttcgcagtttgtcaggctatcgaaattatggagaaagtgatttagaaaggttgcattttattcgacactcacgcaatgttgggttttcgttacatcaaatcgcacaattattagcactacaagataatcctaagcgtagctgccgagaagtgaaagtgctaactgctcaacatattgcgacattaaatcaacaaatagaacagttacaaaaaatggtacaaaaattgcagcactggcacgacagttgtcagggcaatgacaaccctgaatgtttaattttgaatggcttgaacggataa

SEQ ID NO: 584 - protein, 128 aa, Haemophilus influenzae
MNISEAAKLVGLSTKQIRDYEKIGLIKPAVRSLSGYRNYGESDLERLHFIRHSRNVGFSLHQIAQLLALQDNPKRSCREVKVLTAQHIATLNQQIEQLQKMVQKLQHWHDSCQGNDNPECLILNGLNG

SEQ ID NO: 585 - DNA, 318 bp, Haemophilus influenzae
atggcgaattgggatggaaaatatatcagcccttatgcagaacacggcaaaaaaagtgagcaagtaaaaaaaattacagtatctattcccattaaagtactggaaattttgacgaatgaacgcactcgccgccaattaaaaagtttacgtcacgcaactaacagtgaattgctttgtgaagcattcttacacgcattcacaggacaacctttacccaccgatgcagatttaatgaaagagcgtaatgatgaaatccctgaagatgccaaagtgcttatgcgtgaattaggtgtcgatccagaaagctgggaatattaa

SEQ ID NO: 586 - protein, 105 aa, Haemophilus influenzae
MANWDGKYISPYAEHGKKSEQVKKITVSIPIKVLEILTNERTRRQLKSLRHATNSELLCEAFLHAFTGQPLPTDADLMKERNDEIPEDAKVLMRELGVDPESWEY

SEQ ID NO: 587 - DNA, 1200 bp, Haemophilus influenzae
atgggcttagaaaatttagctcgtttgcgtaaacaagatattgtctttgcaatcttaaaacagcacgccaaaagtggcgaagatattttcggcggtggtgtgttagaaattttaccagatggttttggtttccttcgttctgccgacagttcctatcttgcaggccctgatgatatttatgtttccccaagtcaaattcgtcgttttaatcttcaaactggggataaaatcgaaggcaaaattcgtccaccaaaagaaggcgaacgctattttgcacttttaaaagttgatcaagtcaatgacgacaaaccagaagtgtcccgtagcaaaatcttatttgaaaacttaacgccattacatgctaactctcgtttaagaatggagagaggcaatggctcaacagaagatttaaccgcgcgtattttggatttagcatccccaattggtaaaggtcaacgtggtttgattgttgctccgccaaaagcaggtaaaaccatgttgctgcaaaacattgcgcaaagtatcacgcataattatcctgacgtggaacttatcgtattactgattgatgaacgcccagaagaagtgacagaaatgcaacgttcagtaaaaggcgaagtgattgcttctacttttgatgagccagcaactcgtcacgttcaagtggcagaaatggtaatcgaaaaagcgaaacgttcagtagagcataaaaaagatgtggtcattttacttgactctattacccgtttagcacgtgcttacaatacagtcactccagcttcaggtaaaattttatctggtggtgtggatgctaacgcattgcaccgtccaaaacgtttcttcggtgctgcgcgtaatgtggaagaaggcggtagtttaacgattattgccactgcgctagtagatacgggttcgaaaatggacgaagttattttcgaagaatttaaaggtacaggtaatatggaattacacctttctcgtaaaatcgcagaaagacgtgtattcccagccattgactttcaacgctctggtactcgtaaagaagacttactcacaacagcggatgaattacaaaaaatgtggattcttcgtaagattcttaatccaatggatgaagtggatgcaatggaattcttgattgataagctgatgatggcaaaaaccaacgaagagttttttgaagtgatgaaacgttcgtaa

SEQ ID NO: 588 - protein, 399 aa, Haemophilus influenzae
MGLENLARLRKQDIVFAILKQHAKSGEDIFGGGVLEILPDGFGFLRSADSSYLAGPDDIYVSPSQIRRFNLQTGDKIEGKIRPPKEGERYFALLKVDQVNDDKPEVSRSKILFENLTPLHANSRLRMERGNGSTEDLTARILDLASPIGKGQRGLIVAPPKAGKTMLLQNIAQSITHNYPDVELIVLLIDERPEEVTEMQRSVKGEVIASTFDEPATRHVQVAEMVIEKAKRSVEHKKDVVILLDSITRLARAYNTVTPASGKILSGGVDANALHRPKRFFGAARNVEEGGSLTIIATALVDTGSKMDEVIFEEFKGTGNMELHLSRKIAERRVFPAIDFQRSGTRKEDLLTTADELQKMWILRKILNPMDEVDAMEFLIDKLMMAKTNEEFFEVMKRS

SEQ ID NO: 589 - DNA, 693 bp, Haemophilus influenzae
atgatttacttcacaatgtttttattaggcggcatcttagggatcgcattgtggttctacctatctggttttattacccgtttacagcaagagatttatgcgacttatattgaattatttccacaaaaccgttctccatttcaaccgcactttgcctctattcaacaaaaaaagtgcggtcatattttgaggtattttttaagtgttggggtaggatttatatttttacaaattgccttcaaagattctatttttactgtatggctaggagccacacttcttatcctttgggcaattagttatcttgattggcactatcaacttatttctactactctctgtttatggctacttacaatcggtttatttggagcagacaataatttttcattgcttacgttatctgaaagcataaaaagtgcggcaagtttttttattgttttctacgcaatctattggattgcaaaattctattacggaaaagaagcctttggacggggagattattggctagcaatggcattaggaagttttattcatttagaaaccttaccgcactttttattattagcctcagttcttggaatatgtttttcgcttattcataaaaagaaaaaagaatttataccttttgccccttttatgaacttatcagctgtcataatttatttcgtcaaatattactggtattaa

SEQ ID NO: 590 - protein, 230 aa, Haemophilus influenzae
MIYFTMFLLGGILGIALWFYLSGFITRLQQEIYATYIELFPQNRSPFQPHFASIQQKKCGHILRYFLSVGVGFIFLQIAFKDSIFTVWLGATLLILWAISYLDWHYQLISTTLCLWLLTIGLFGADNNFSLLTLSESIKSAASFFIVFYAIYWIAKFYYGKEAFGRGDYWLAMALGSFIHLETLPHFLLLASVLGICFSLIHKKKKEFIPFAPFMNLSAVIIYFVKYYWY

SEQ ID NO: 591 - DNA, 1218 bp, Haemophilus influenzae
atgactaaaaaactcttttattatcaaggtagtaacgcattaaatcagaaacaaaaaggctcaattattgcggatacgaaacaacaagcacactttcagttaataagccacgggcttactcacatcaaattacaacaaaactggcaatttggggcaaaaaccaaaaattcagaaatcagtgaattactcaatcaattagcgacattgctacagtccgcaattccgttaaaaaacagcctgcaaattttgcaacaaaattgtactcaaattatgctcaacgaatggcttgaacggctgcttcaatctattgaatctggcttagcattctcacaagctattgaacaacaaggaaaatatctcacacaacaagaaattcaactgattcaagtgggagaaatgacaggaaaacttgccgttgtttgtaaaaaaatagccacacatcgtagccaatctttggctttacaacgcaaattacagaaaattatgttatatccctcaatggtattaggaatttctctattattgacactcgcattactgctttttatcgtgcctcaatttgctgaaatgtacagtggcaataatgccgaattaccaacaataaccgcaatattgctctctatatccaattttcttaagcaaaatattggcattttgctatttttcgctttgagttttgttctattttattacttctatctaaaacgccagacttggtttcatcaaaagaaaaatcaacttatttctatcacgcctatttttggcacaattcaaaaactttcacgtttagtgaactttagtcaaagtttacaaattatgttgcaggctggcattccgcttaatcaagcgctagacagttttctccctcgcacacaaacgtggcaaaccaagacgcttgtaaatgacatcatattagataaagaagtgcggtcaattttacaatgggtttctcaaggctatgcgttttctgatagtgtaagtagcgatctttttccgatggaagcacaacaaatgttacaaattggcgagcaaagcggaaaactcgctttgatgctggagcatattgcggataattaccaagaaaaacttaatcatcaaattgacttactctcacaaatgctagaaccattaatgatggtgatcatcggcagtctgattggaattattatgatgggaatgtatttacctatctttaatatgggctctgttattcaatga

SEQ ID NO: 592 - protein, 405 aa, Haemophilus influenzae
MTKKLFYYQGSNALNQKQKGSIIADTKQQAHFQLISHGLTHIKLQQNWQFGAKTKNSEISELLNQLATLLQSAIPLKNSLQILQQNCTQIMLNEWLERLLQSIESGLAFSQAIEQQGKYLTQQEIQLIQVGEMTGKLAVVCKKIATHRSQSLALQRKLQKIMLYPSMVLGISLLLTLALLLFIVPQFAEMYSGNNAELPTITAILLSISNFLKQNIGILLFFALSFVLFYYFYLKRQTWFHQKKNQLISITPIFGTIQKLSRLVNFSQSLQIMLQAGIPLNQALDSFLPRTQTWQTKTLVNDIILDKEVRSILQWVSQGYAFSDSVSSDLFPMEAQQMLQIGEQSGKLALMLEHIADNYQEKLNHQIDLLSQMLEPLMMVIIGSLIGIIMMGMYLPIFNMGSVIQ

SEQ ID NO: 593 - DNA, 1395 bp, Haemophilus influenzae
atgacgagctatgctttacttcatactcagcgtgtaaccgctcaaaatggcgagatctttacgatctcgcctgatttatgggcgcgtaatcaacaacagcaatccttgctcttgcggtattttgctttgccacttaaagaagaaaataatcgtctttggctaggggttgattctctctccaatctttcagcttgtgaaaccattgcgtttataacaggaaaacctgtcgaaccaattttgttagaaagcagccaactcaaagaactgttacaacaacttactccgcaccaaatgcaagtggaagagcaagttaaattctatcaacatcaagaaacccattttgaacaagaagatgatgaacctgttatccgcttacttaatcagatttttgaatctgccttacaaaaaaatgcctctgatattcatttagaaaccttggctgatcagtttcaagtgcggtttagaattgatggtgttttacaaccacaacccttaataagcaaaatattcgccaatcgtattatttcacgcttaaaattactggctaaattagatattagtgaaaatcgacttccacaagatgggcgatttcaatttaaaaccactttttccgatattcttgattttcgcctttcaaccttaccaacccattggggcgaaaaaatcgtgttgcgagcgcaacaaaataaacctgtagaacttagctttactgaactgggtatgaccgaaaatcagcaacaagcatttcaacacgctcttagccaaccccaaggattaattttagtaactggcccaacaggaagtggaaaaagtatctcactttacactgcacttcaatggcttaatacacctgataaacacattatgacagcggaagatcccattgaaattgagcttgatggcattattcaaagccaaattaatccacagattggattagattttagccgtctattgcgcgcttttttacgtcaagatcccgatatcattatgctaggtgaaattcgtgatgaagaaagtgcaaggattgcattacgtgccgcccaaacagggcatttggtgctttcaactttacataccaatgatgcaatttctgccatttctcgcttacaacaactcggtattcagcagtatgaaattgagaacagtttactactcgtcattgcacagcgtcttgtacgaaaaatctgtccaaagtgcggtggaaatttaataaattcttgtgattgccatcaaggttatcgagggcgaatcggcgtgtatcaatttctacattggcaacagaatggctatcaaacggattttgagaatttacgagagagtggtttagaaaaagttagccaaggcataacagatgagaaagaaattgaacgtgtgttaggtaaaactttatga

SEQ ID NO: 594 - protein, 464 aa, Haemophilus influenzae
MTSYALLHTQRVTAQNGEIFTISPDLWARNQQQQSLLLRYFALPLKEENNRLWLGVDSLSNLSACETIAFITGKPVEPILLESSQLKELLQQLTPHQMQVEEQVKFYQHQETHFEQEDDEPVIRLLNQIFESALQKNASDIHLETLADQFQVRFRIDGVLQPQPLISKIFANRIISRLKLLAKLDISENRLPQDGRFQFKTTFSDILDFRLSTLPTHWGEKIVLRAQQNKPVELSFTELGMTENQQQAFQHALSQPQGLILVTGPTGSGKSISLYTALQWLNTPDKHIMTAEDPIEIELDGIIQSQINPQIGLDFSRLLRAFLRQDPDIIMLGEIRDEESARIALRAAQTGHLVLSTLHTNDAISAISRLQQLGIQQYEIENSLLLVIAQRLVRKICPKCGGNLINSCDCHQGYRGRIGVYQFLHWQQNGYQTDFENLRESGLEKVSQGITDEKEIERVLGKTL

SEQ ID NO: 595 - DNA, 450 bp, Haemophilus influenzae
atgaaactaacaacacagcaaaccttgaaaaaagggtttacattaatagagctaatgattgtgattgcaattattgctattttagccactatcgcaattccttcttatcaaaattatactaaaaaagcagcggtatctgaattactgcaagcgtcagcaccttataaggctgatgtggaattatgcgtttatagcacaggtaaaccttccagttgctcgggaggaagcaatggaattgcagcagatataacgacagcaaaaggctatgtaaaatcagtgacaacaagcaacggtgcaataacagtaaaaggggatggcacattggcaaatatggaatatattttgcaagctacaggtaatgctgtagcaggtgtaacttggacaacaacttgcaaaggaacggatgtctctttatttccagcaaatttttgcggaagtgtcaaaaaatga

SEQ ID NO: 596 - protein, 149 aa, Haemophilus influenzae
MKLTTQQTLKKGFTLIELMIVIAIIAILATIAIPSYQNYTKKAAVSELLQASAPYKADVELCVYSTGKPSSCSGGSNGIAADITTAKGYVKSVTTSNGAITVKGDGTLANMEYILQATGNAVAGVTWTTTCKGTDVSLFPANFCGSVKK

SEQ ID NO: 597 - DNA, 561 bp, Haemophilus influenzae
atgcaaaaactaaaagatattgaacaaggtatattggattgtcggcaaattcagtcacctcacttcgataaacgcccaaatccacaggatatttccttattggttattcattatattagtctgccgccagaacaatttggcggcggatatgtggatgatttttttcaaggaaaattagatcctaagattcatccttattttgcagaaatttatcaaatgcgtgtttcagcacattgtttgatcgaacgaaatgggcgaattacgcaatatgtcaattttaatgatcgcgcttggcacgcaggcgtatctaattttcaaggacgagaaaaatgtaatgattttgccattggaattgagctggaggggagtaatgaacagccttttaccgacgctcaatatttttcattgcaagagcttactaacgtaataatgaaaagttacccgaagattacgaaaaatcgaattgttggacattgcgatatttcgccagggcgtaagatcgatcctggtcaatattttgattgggaacgttatttatccagtgtaaaacaaactgtataa

SEQ ID NO: 598 - protein, 186 aa, Haemophilus influenzae
MQKLKDIEQGILDCRQIQSPHFDKRPNPQDISLLVIHYISLPPEQFGGGYVDDFFQGKLDPKIHPYFAEIYQMRVSAHCLIERNGRITQYVNFNDRAWHAGVSNFQGREKCNDFAIGIELEGSNEQPFTDAQYFSLQELTNVIMKSYPKITKNRIVGHCDISPGRKIDPGQYFDWERYLSSVKQTV

SEQ ID NO: 599 - DNA, 963 bp, Haemophilus influenzae
ttgcgattttttctaaaatgtgatactttttcgccgtcaataagacatcaaacacaaatcaatatgaacgacgaacagcaaaattcaaaccaatctgaaaatacgaaaaaaccttttttccaatctttattcggtcgcttttttcaaggcgaactaaaaaatcgtgaagaacttgtggaagtgattcgcgattcagaacaaaacgatttaattgatcaaaatacgcgtgaaatgattgaaggcgtgatggaaattgcggaacttcgtgttcgtgatattatgattcctcgttcacaaattatttttattgaagatcaacaagatttaaatacttgtttaaacacaattattgaatccgcacattctcgttttcctgtgattgccgatgccgatgaccgcgataatatcgtaggcattttgcacgcaaaagatttattaaaatttttacgtgaagatgccgaagcgtttgatttatcttcattattgcgccccgtcgtgattgtgccagaaagcaaaagagtggatcgtatgttaaaagatttccgttcagagcgtttccatatggccattgtggtggatgaatttggtgcagtgtcggggcttgttactattgaagatattttggaacaaattgttggcgatattgaagatgaatttgatgaagaagagattgcggatattcgtcagctttctcgtcatacttatgcagtgcgtgcgctcaccgatattgatgatttcaatgggcaatttaatacggattttgatgatgaagaagtagataccattggcggtctgattatgcagacttttggttatttaccaaaacgtggggaagaaattattttgaaaaatcttcaatttaaagtgacttctgcagatagtcgtcgattaattcaacttcgagtcacagtgccagatgaacatttggcagaaatgaataatgtagatgaaaaatctgaatag

SEQ ID NO: 600 - protein, 320 aa, Haemophilus influenzae
MRFFLKCDTFSPSIRHQTQINMNDEQQNSNQSENTKKPFFQSLFGRFFQGELKNREELVEVIRDSEQNDLIDQNTREMIEGVMEIAELRVRDIMIPRSQIIFIEDQQDLNTCLNTIIESAHSRFPVIADADDRDNIVGILHAKDLLKFLREDAEAFDLSSLLRPVVIVPESKRVDRMLKDFRSERFHMAIVVDEFGAVSGLVTIEDILEQIVGDIEDEFDEEEIADIRQLSRHTYAVRALTDIDDFNGQFNTDFDDEEVDTIGGLIMQTFGYLPKRGEEIILKNLQFKVTSADSRRLIQLRVTVPDEHLAEMNNVDEKSE

SEQ ID NO: 601 - DNA, 1530 bp, Haemophilus influenzae
atgaataaatatttaacttattttattgcttttatatcgggtttagtcggtgtttttgccttttcgccatttgattattggcctttagcctatgtgtctttactcggtttactttatgtcgctaaaaatcctaaaaaatccaccgcacttttatccactttcttgtgggcgatgggatttttctgctttggggtgagttggcttaatgttagtatccatcaatttggcggtgcgtctttaggggtaagttatttccttgtcggtttgcttgcgacttatcttgcattatatccgatgctctttacctatttagttcagcgtttcaaagtgcaaagtgcagtaatttttgccgtgatttggacattgacagaatttttacggggttggatttttactggttttccttggcttcagtttggttatacacaaattgacagcccattttatggtctcgccccaatttttggggtaacaggattgacgttctttaccctttgggcaagtgcggtcatttttaatctcgtttcctctttgtttaaaacgaaaaatcttaaattagttttagcgaatgctttgttattgattatcgtagggggattaagtgcttattcatcgcaaattcactttgtaaaatctgttgaagataaggcgatttcagtcacacttgcacaaggcaatattgaacaaaatcttaaatgggatcctaattatttctattctactttggcaatttatcaaaaattaatcgcagaaaatcttggtaaaaccgatttaattattttgcctgaatcagccttaccaacccttgaaaatgcaattacaccattttttgaaaaattagagcatgctgctaaagaaactaaaacggagattatgattggaacggtattccaagacacaaaatctggtaagttattaaattcaattatgactgctggaaacccagattttccttatcaaccagatacgccaaatcgttataataaacatcatctcgtgcctttcggggaatatgttccgctagaaagtattttgcgaccgcttaattcagtgtttaacttaccaatgtcagcatttcaaagtggggaggcagttcaaccctctttaatcgcaaaaaaacgtgctttttcgccagcaatttgttatgaaattattttcggcgagcaagtgcgacaaaatttgaaacaagatacggattatttgctcaccttatctaatgatgcgtggtttggcgattctattgggccttggcaacatttacagatggcaagaatgcgtgctttagaattaggcaaaccgcttattcgtgcaacaaatacggggatttcagtttttgttgatgcgcaaggtaaggtattagcacaagccccgcaatttattgaaacaactttgacttataaaattgcacctgcggaaggaaaaaccccttattctgtgttaggaaatatgcctttgtatgctttatctttattgtttttactcttgcacagtatgatggcgtttattcgtcgtaagatgaatatcttataa

SEQ ID NO: 602 - protein, 509 aa, Haemophilus influenzae
MNKYLTYFIAFISGLVGVFAFSPFDYWPLAYVSLLGLLYVAKNPKKSTALLSTFLWAMGFFCFGVSWLNVSIHQFGGASLGVSYFLVGLLATYLALYPMLFTYLVQRFKVQSAVIFAVIWTLTEFLRGWIFTGFPWLQFGYTQIDSPFYGLAPIFGVTGLTFFTLWASAVIFNLVSSLFKTKNLKLVLANALLLIIVGGLSAYSSQIHFVKSVEDKAISVTLAQGNIEQNLKWDPNYFYSTLAIYQKLIAENLGKTDLIILPESALPTLENAITPFFEKLEHAAKETKTEIMIGTVFQDTKSGKLLNSIMTAGNPDFPYQPDTPNRYNKHHLVPFGEYVPLESILRPLNSVFNLPMSAFQSGEAVQPSLIAKKRAFSPAICYEIIFGEQVRQNLKQDTDYLLTLSNDAWFGDSIGPWQHLQMARMRALELGKPLIRATNTGISVFVDAQGKVLAQAPQFIETTLTYKIAPAEGKTPYSVLGNMPLYALSLLFLLLHSMMAFIRRKMNIL

SEQ ID NO: 603 - DNA, 738 bp, Haemophilus influenzae
atgcgcataccaagaatttatcatccaatatcccttgaaaatcaaactcaatgttatctttcagaagacgcggcaaatcacgttgctcgagtgttaagaatgacagaaggcgaacagcttgaactctttgatggttctaatcatatttatccagcaaaaattattgagtcaaataaaaagtccgtaaaagtagagattttagggcgtgagcttgcggataaagaatcccatttaaaaatccatttaggacaagtgatttctcgtggagaacgaatggaatttactattcaaaaatccgtagaattaggggtaaatgtgattacgccattatggtcagaacgctgtggcgtaaaacttgacgcagagcggatggataaaaaaatccaacaatggcaaaaaattgcgattgcagcttgtgagcaatgcggtcgtaatattgtgccagaaattcgtccattgatgaaattgcaagattggtgtgcagaaaatgatggcgcgttgaaattgaatttacatccacgcgcacactattctattaaaaccttaccgactattcctgctgagggtgttcgcttattaattggctcggaaggtggattatcagcacaagaaattgcccaaactgaacagcaaggatttactgaaattttattaggaaaacgtgttttgcgtactgaaactgcatcacttgcagcgataagtgcattgcaaatttgttttggggacttaggcgaatga

SEQ ID NO: 604 - protein, 245 aa, Haemophilus influenzae
MRIPRIYHPISLENQTQCYLSEDAANHVARVLRMTEGEQLELFDGSNHIYPAKIIESNKKSVKVEILGRELADKESHLKIHLGQVISRGERMEFTIQKSVELGVNVITPLWSERCGVKLDAERMDKKIQQWQKIAIAACEQCGRNIVPEIRPLMKLQDWCAENDGALKLNLHPRAHYSIKTLPTIPAEGVRLLIGSEGGLSAQEIAQTEQQGFTEILLGKRVLRTETASLAAISALQICFGDLGE

SEQ ID NO: 605 - DNA, 528 bp, Haemophilus influenzae
atgccacatttagacgattattttaatcgcacggtggtgtttatgtgtgagcataatgaacagggttcaatgggtttggtaattaatcagccgacagatttaagcattgcggaactttattcaaaactcaattttatgatgaaaaatgaccgcacttttggtaatgaaatggtggttgcgggtgggcctgcgcatacagaaagagggtttattttacataagaatacgcttaatgcttttcaacatacttacaaagtcacaaaggaactttcaatgacaacctccgctgatgtggtggaaacgctaggttcaacttttgcacctgaaaaatatcttgttgcgctaggatgttcaagctggggggctggtcagttagaaaaagaaatcagagataatgcgtggttggtggtgtcatctaacgatcaaattttatttgatatgccctatgaagatcgttatgctgcagccaatcagttacttggtattcatccttataattttgcgttagcgcaagtggggcatagttaa

SEQ ID NO: 606 - protein, 175 aa, Haemophilus influenzae
MPHLDDYFNRTVVFMCEHNEQGSMGLVINQPTDLSIAELYSKLNFMMKNDRTFGNEMVVAGGPAHTERGFILHKNTLNAFQHTYKVTKELSMTTSADVVETLGSTFAPEKYLVALGCSSWGAGQLEKEIRDNAWLVVSSNDQILFDMPYEDRYAAANQLLGIHPYNFALAQVGHS

SEQ ID NO: 607 - DNA, 420 bp, Haemophilus influenzae
atgggaattaccgctctggcttttgattttggcactaaaagtatcggttgtgccataggacaaagtattactggcacagcacaagccttgcccgcttttaaggcacaagatggcatcccaaattgggaagcgatcgaaaaatgtttgaaagaatggaaaccagatgttgtcattgttggtcttcctttaaatatggacggaacagaacaagatctcactctacgtgctcgtaaatttgcaaatcgtttacaaggtcgttttggcgttaatgttcatttacaagatgaacgattaaccaccacgcaagctcgtagtgagatttttgaacgtggtggttttaaagcattaaaaaaaggcaaaatcgatggggtgtcagcttgtttaattttagagagctggtttgaatacgctgaatattag

SEQ ID NO: 608 - protein, 139 aa, Haemophilus influenzae
MGITALAFDFGTKSIGCAIGQSITGTAQALPAFKAQDGIPNWEAIEKCLKEWKPDVVIVGLPLNMDGTEQDLTLRARKFANRLQGRFGVNVHLQDERLTTTQARSEIFERGGFKALKKGKIDGVSACLILESWFEYAEY

SEQ ID NO: 609 - DNA, 909 bp, Haemophilus influenzae
atgtggttcaaaaatttaatgacttatagactgactaaaccgctagattgggatcttacacaactacaaactcaactggaagattgtcaattccatccttgcggtgctcaagatcaaagtaaatttggctggtcagctccattaagaggtgctgatttactctatttttctgtaggaaaacaaattctattaatcgccaaaaaagaagaaaaaatcttgccggcaaatgtggtcaaacgtgaacttgatgaacgcattgaaagccttgaacaaaaagaaaatcgcaaacttaaaaaggtagaaaaacagacattaaaagatgatgtcgtgatgaatttattacctcgtgcatttagtaaaaatcagcatacggcactatggattgatacggaaaataatcttgttcatgttgatgccgcatcgagtaaacgcgcagaagatgcgctcgcattactgcgtaaatccttaggttcgctccctgtcgtgcctttagcctttgctaatgaacccagcacgattttaaccaattggatccttcaagatagcttaccgcattggttacttgcattagaagaagccgagcttcgtggcagtcaggaagacagcgttattcgttgtaaaaaacaacccttagaaaatgaagaaattctcgctcttctgcaagatggcaaaaaagtagtaagtaaattagccttagaatgggaggataccttaactttcgtttttaacgaagattgcacaatcaaacgtttaaaatttgcagatactgtacgggaaaaaaatgatgatattctgaaagaagattttgcacagcgtttcgatgcagattttgtactgatgacaggtattttagccaaactcaccgaaaatttattagatgaatttggtggcgaaaaagcgagattataa

SEQ ID NO: 610 - protein, 302 aa, Haemophilus influenzae
MWFKNLMTYRLTKPLDWDLTQLQTQLEDCQFHPCGAQDQSKFGWSAPLRGADLLYFSVGKQILLIAKKEEKILPANVVKRELDERIESLEQKENRKLKKVEKQTLKDDVVMNLLPRAFSKNQHTALWIDTENNLVHVDAASSKRAEDALALLRKSLGSLPVVPLAFANEPSTILTNWILQDSLPHWLLALEEAELRGSQEDSVIRCKKQPLENEEILALLQDGKKVVSKLALEWEDTLTFVFNEDCTIKRLKFADTVREKNDDILKEDFAQRFDADFVLMTGILAKLTENLLDEFGGEKARL

SEQ ID NO: 611 - DNA, 816 bp, Haemophilus influenzae
atgcaacacaaattgattgcctttattggtggcggcaatatggcacaagctattattcttggattattgaaacaaggttatcctgccgagcaaattattgtgaatgatccgaatgaggaaaaaagagcattttttgccaatcttggcgtggcaacttcagaagataatatggaaagtgcaatcaaagctgaggttgtgttgcttgcggtaaaacctcaaatgatggctgaagtttgttcgccactaagtgcggtggatttttccgacaaattgttaatttccattgccgccggtatttcaactgaacgcttgaacgcattaattccaagcgtaaaatcgatagtacgcgtcatgccaaatacgcccgcattggtgggggaaggtatggcggggttatttgcaccgaaaaatacgagtgaaaattaccgcacttttgcacaagatttattgggagcagtgggaagaacggtttgggtgaatgatgaaactcaaatgcacgcagtcactgccgcgtcaggaagtagcccagcctatttctttttaatgctggaagcgatgcagaaagccttaatcaaaatgaatatagatgagaaaactgcccgtgaattagtgcagcaatctatgcttggtgcagcaaaaatggtgacagaaaatccgcaaattgcactttcaactttgcgtgaaaatgtcacctcgaaaggtggcactactgaggcagcgttagcagtatttgacgcacaacattttaatcaaacaatagagcaagctatgcaggcttgtttgtctcgttcacaagaaatggaaactttattctga

SEQ ID NO: 612 - protein, 271 aa, Haemophilus influenzae
MQHKLIAFIGGGNMAQAIILGLLKQGYPAEQIIVNDPNEEKRAFFANLGVATSEDNMESAIKAEVVLLAVKPQMMAEVCSPLSAVDFSDKLLISIAAGISTERLNALIPSVKSIVRVMPNTPALVGEGMAGLFAPKNTSENYRTFAQDLLGAVGRTVWVNDETQMHAVTAASGSSPAYFFLMLEAMQKALIKMNIDEKTARELVQQSMLGAAKMVTENPQIALSTLRENVTSKGGTTEAALAVFDAQHFNQTIEQAMQACLSRSQEMETLF

SEQ ID NO: 613 - DNA, 1206 bp, Haemophilus influenzae
ttgtttgtctcgttcacaagaaatggaaactttattctgatgcaagttcgtcctttttattggctcgcactgagctttctaggttactactgcgcttatggcgtgtttttgcctttctttcccgcatggttaaaatcacaacaatatggcgaagaaatgattggtttggttatcgggagtgcttatattttccgatttgcgggcggattatttttttcatcgctgattaaaaaagccaatcatattattagttccttacgcctattggcgttagcatcggcaattattatggcggctatgagtttagttgcacataatttttggttgttgtttattgctatcggtttgtatgcttctgtgaattcagcaggaatgccgattggggattcgttggcatccacttggcaacgccaaatcggcttggattacggcaaagtacgtttgattggttcttctgcctttatccttggcgtggtggtttttggtggaatgattggctgggttggcgagcaaaatatcgtgtggattttaaccgcacttttatccttctataccatcattcagcttttaaaaccgaccattcccccaaaagatgaaatacctgaagatggcgttcaaaatgatgttggttttattgctttactgaaaaatccgatgacattacgaatcatggttgcagtgggactgattcaaggctctcatgcggcttattatgtttatagcacgatttattggacaagcattgggatctccgtttctcaaacaagcttactttggggcattggcgtattggcagaaattgtattatttttcttttctcgtcgtttatttcaaaatatttctatcagcgtactgctttatatttctgcgtttgcgtgcgttggacgctgggctgtaatgggatatatcgaagatttttggttgatattcttattgcaacttatacacagtttaacctatgccgtttgccattatgcgattgttcgctatatcaccacgcaaccgcaaaaccatattgcgaagttacaaggtttgtataatggtttatccaatggtgtgctcattgctattttcactgcgattgctggcatgatttatccaacgtcgccagcgatgacatttgtatttatgagtatcattgcagctgcagcattttttgtgattccacgtaagttaaatgcctttttgattgttcagcataaatag

SEQ ID NO: 614 - protein, 401 aa, Haemophilus influenzae
MFVSFTRNGNFILMQVRPFYWLALSFLGYYCAYGVFLPFFPAWLKSQQYGEEMIGLVIGSAYIFRFAGGLFFSSLIKKANHIISSLRLLALASAIIMAAMSLVAHNFWLLFIAIGLYASVNSAGMPIGDSLASTWQRQIGLDYGKVRLIGSSAFILGVVVFGGMIGWVGEQNIVWILTALLSFYTIIQLLKPTIPPKDEIPEDGVQNDVGFIALLKNPMTLRIMVAVGLIQGSHAAYYVYSTIYWTSIGISVSQTSLLWGIGVLAEIVLFFFSRRLFQNISISVLLYISAFACVGRWAVMGYIEDFWLIFLLQLIHSLTYAVCHYAIVRYITTQPQNHIAKLQGLYNGLSNGVLIAIFTAIAGMIYPTSPAMTFVFMSIIAAAAFFVIPRKLNAFLIVQHK

SEQ ID NO: 615 - DNA, 894 bp, Haemophilus influenzae
atgaaaaatcttgcacttattgatttgtttcttaacgaatattggattgaaaaagggctttcagaaaataccgttcaatcttatcgtttggatttaaccgcactttgtgattggttggataaaaacgacttgtctttggaaactttagatgctgttgatttgcaaggttttctaggagagcgtttggagaaaggttacaaagccacgagcaccgcgcgaatgttaagtgcaatgcgtaaacttttccaatatttatatcgggaaaaatatcgagtggatgatccaagtgcggtgctaagttcgcctaaattacccagtcgcttgccaaaatatttaaccgagcaacaagtgtcagatttgctcaatacgccagatgttgaagtgcctttggagttgcgtgataaagcaatgttagagttgctttatgcaacggggcttcgtgtaactgagttagtttcgcttacgattgaaaacatgagcgtgcaacaaggcgtagtgcgagtgattggtaaagggaacaaggaacgtattgtgccaatgggggaagaagctgcctattgggttcgtcaatttatgctttatggtcgccctgtgctattaaatgggcagagttctgatgttgtgtttccaagtcagcgcgcacagcaaatgactcgtcaaactttctggcatcgtgtaaaacattatgccattctcgcagatattgatgcggatgcactttcccctcacgttcttcgccatgcttttgccacccatttagtgaatcacggtgcggatttacgcgtggtgcaaatgttgttaggtcatacagatttatctacaacacagatttatactcacgtggcaaaagaaagattgaaacgattgcatgaaagatttcatcctagaggataa

SEQ ID NO: 616 - protein, 297 aa, Haemophilus influenzae
MKNLALIDLFLNEYWIEKGLSENTVQSYRLDLTALCDWLDKNDLSLETLDAVDLQGFLGERLEKGYKATSTARMLSAMRKLFQYLYREKYRVDDPSAVLSSPKLPSRLPKYLTEQQVSDLLNTPDVEVPLELRDKAMLELLYATGLRVTELVSLTIENMSVQQGVVRVIGKGNKERIVPMGEEAAYWVRQFMLYGRPVLLNGQSSDVVFPSQRAQQMTRQTFWHRVKHYAILADIDADALSPHVLRHAFATHLVNHGADLRVVQMLLGHTDLSTTQIYTHVAKERLKRLHERFHPRG

SEQ ID NO: 617 - DNA, 348 bp, Haemophilus influenzae
ttgctatctttcgaaaaatttcgacatttattctatcgaaaagtaattttggattctaaaatgaaaaaaatcacgcttttttttaccgcacttttatgcttattttcaacttctgttttagccgaatctaattcaatgcctaaacaatgcgaacaactatttaaagaaacagagaatttgattgcccaagcagaaaaacaacctggaacccacattcaagtaaataaaatcaaaagtaaactaaaccaaagcaaacaacaaattcttcaaatggaattagcgactcagttaaaaagttgtgaagtgggtttagcaaaattaagtaacttgaaaagttatagtgagtaa

SEQ ID NO: 618 - protein, 115 aa, Haemophilus influenzae
MLSFEKFRHLFYRKVILDSKMKKITLFFTALLCLFSTSVLAESNSMPKQCEQLFKETENLIAQAEKQPGTHIQVNKIKSKLNQSKQQILQMELATQLKSCEVGLAKLSNLKSYSE

SEQ ID NO: 619 - DNA, 1008 bp, Haemophilus influenzae
atgattgaagcagatagaattattagcagtcaggcaaagattgatgaagatgttatcgaccgtgctattcgtcctaaactattagcagattatgttgggcagccgcaagtacgcgagcagatggatattttcatcaaggcagccaaactacgtcaagatgccttagatcatttattgatttttggccctccaggtttgggaaaaacaacgcttgctaatattgtggcaaatgaaatgggcgtgaatattcgtacgacgtcagggcctgtgttagaaaaagcgggcgatttggctgcaatgctaaccaatcttgaaccgcatgatgtgttatttattgatgaaatccatcgactttcccctgctattgaagaagtcctttatccagcaatggaagactatcagttggatattatgattggcgaaggacccgctgctcgttccattaaattagatttgcccccttttactttggttggcgcgaccactagagcgggttctttgacttctccattgcgtgatcgttttggtattgtgcaacgtttggagttttattctgtagaagatttaacatctatcgttgcaagaagtgcggactgtttaaatcttgaattagaacaacaagccgctttcgaggtggctcgtcgttcacgaggcactcctagaattgcaaaccgtttattacgacgtgtgcgtgattatgcagatgtacgtaatggcggtattatttctataaatgtggcaaaacaagcactttcaatgctagatgtagacgatgctggatttgattatttagatagaaagttgttgtctgcagttattgagcgttttgatggaggccctgtgggactagataatcttgctgctgcaattggcgaagaacgtgataccattgaagatgtgttagagccttatttgattcaacaggggtttctacaaagaacgccgcgtggtcgtattgcaacatcgcaaacttatcgtcattttggtttgcagaaattatcagactag

SEQ ID NO: 620 - protein, 335 aa, Haemophilus influenzae
MIEADRIISSQAKIDEDVIDRAIRPKLLADYVGQPQVREQMDIFIKAAKLRQDALDHLLIFGPPGLGKTTLANIVANEMGVNIRTTSGPVLEKAGDLAAMLTNLEPHDVLFIDEIHRLSPAIEEVLYPAMEDYQLDIMIGEGPAARSIKLDLPPFTLVGATTRAGSLTSPLRDRFGIVQRLEFYSVEDLTSIVARSADCLNLELEQQAAFEVARRSRGTPRIANRLLRRVRDYADVRNGGIISINVAKQALSMLDVDDAGFDYLDRKLLSAVIERFDGGPVGLDNLAAAIGEERDTIEDVLEPYLIQQGFLQRTPRGRIATSQTYRHFGLQKLSD

SEQ ID NO: 621 - DNA, 615 bp, Haemophilus influenzae
atgattggtcgcttacaaggcattcttttagaaaaacaacctccagaaattttactcaatgtgcaaggcgtaggctatgaattgcttttgcctatgacgagtttctatgatttaccagaaattggacaagaaacaactttattcacccatcttgttgttcgggaagatgctcacttactctttggatttgcccagaaaacagaccgcactttatttcgtgaattaattaaaacaaatggggttgggcctaaattagccctagcgattttatctgccatgtcggtcgaacaatttgcctatgcaatagagagagaagaactttctaaactcactaaaattccaggtgttggcaaaaaaacagctgaacgtttgttagttgaactcaaaggtaaatttaaaggcgtaaaacaaagcgatttctttgtagaaagtacgcatattccattatccccatctattgaatcccactcggaaagttcatctgatgaagcaatttcagccttgattgctttaggttataaacctgcagaagcagaaaaaatggtaaaacgcgttgctaaacctgaattaaccagtgaacaagttattcgtgaagcattaaaagccgcattgtag

SEQ ID NO: 622 - protein, 204 aa, Haemophilus influenzae
MIGRLQGILLEKQPPEILLNVQGVGYELLLPMTSFYDLPEIGQETTLFTHLVVREDAHLLFGFAQKTDRTLFRELIKTNGVGPKLALAILSAMSVEQFAYAIEREELSKLTKIPGVGKKTAERLLVELKGKFKGVKQSDFFVESTHIPLSPSIESHSESSSDEAISALIALGYKPAEAEKMVKRVAKPELTSEQVIREALKAAL

SEQ ID NO: 623 - DNA, 573 bp, Haemophilus influenzae
atgagcattattttaggtattgaccctggatctcgcgtaacgggctacggtgtgattcgccaaacagggagacatttggaatatctcggcagtggcgcaattcgtactcaagttgaagatttaccaacccgcttgaaacgcatttatgctggggtaactgaaatcatcacgcaatttcaacctaatatgtttgcgattgagcaagtgtttatggcgaagaatgcggattcagctttaaaactcgggcaggctcgcggcacggcgattgttgcagcggtaaatcatgatttgcctgtttttgaatatgccgcacgtttagtaaaacaaacggttgtaggcattggttcggcagataaagtgcaagtgcaagaaatggtgactcgtattttgaagttgtcagataaacctcaagccgatgcagcggatgcgttggctattgcgattacacatgcgtattctattcaacattctttacatattgccaattctgtgaaaatgacagaaacgcaagaaaaaatgaccgcacttttaaagaccagatatagccgaggacgctttagattaaaaatttaa

SEQ ID NO: 624 - protein, 190 aa, Haemophilus influenzae
MSIILGIDPGSRVTGYGVIRQTGRHLEYLGSGAIRTQVEDLPTRLKRIYAGVTEIITQFQPNMFAIEQVFMAKNADSALKLGQARGTAIVAAVNHDLPVFEYAARLVKQTVVGIGSADKVQVQEMVTRILKLSDKPQADAADALAIAITHAYSIQHSLHIANSVKMTETQEKMTALLKTRYSRGRFRLKI

SEQ ID NO: 625 - DNA, 741 bp, Haemophilus influenzae
atggcaggtcatagtaagtgggctaatattaaacaccgcaaagcagcacaagatgcacaacgcggtaaaatttttactaaattaattcgtgaacttgttaccgcagctaaaattggtggtggcgatgtgagtgctaacccacgtttacgtgcagcagtagataaagcacttagcaacaatatgacgcgcgatactatcaaccgcgctattgatcgtggcgtaggtggtggcgatgacaccaatatggaaaccaaaatctatgaaggttatggcccgggcggtacagcggttatggtggaatgtttaagtgataatgcaaaccgtacgatctcacaagtgcgccctagttttactaaatgtggtggtaacttgggaacagaaggttctgtgggttatttatttagcaaaaaaggtttaatcttaatcgcagaagcggatgaagatgccttaactgaagcggcaatcgaagcgggtgctgatgatattcaaccacaagatgatggttcatttgaaatctatactgcttgggaagatttaggttcagtgcgtgatggcattgaagcagctggttttaaagtacaagaagctgaagtaacgatgattccatcaacaaccgttgatcttgatattgaaactgcaccaaaattacttcgtttaattgatatgctggaagattgtgatgacgtacaaaacgtatatcacaacggagaaatctgtgacgaagtggcatctcaactttaa

SEQ ID NO: 626 - protein, 246 aa, Haemophilus influenzae
MAGHSKWANIKHRKAAQDAQRGKIFTKLIRELVTAAKIGGGDVSANPRLRAAVDKALSNNMTRDTINRAIDRGVGGGDDTNMETKIYEGYGPGGTAVMVECLSDNANRTISQVRPSFTKCGGNLGTEGSVGYLFSKKGLILIAEADEDALTEAAIEAGADDIQPQDDGSFEIYTAWEDLGSVRDGIEAAGFKVQEAEVTMIPSTTVDLDIETAPKLLRLIDMLEDCDDVQNVYHNGEICDEVASQL

SEQ ID NO: 627 - DNA, 447 bp, Haemophilus influenzae
atgatgcaatacaaaaataatcaatctgttctcgttgtaatttacactaaagatacaaacagagttttaatgctccaacgtcaagatgatcctgatttttggcagtctgttactggcaccattgaaagtggtgaaacaccaaaaaaaacagcaattcgtgagctatgggaagaagtgcggttagaaatttcggaaaattccaccgcactttttgattgcaatgagagcatagaatttgaaatttttccacatttccgctataaatacgcaccgaatgtgacgtattgccgtgaacattggtttttgttggcaatggagcaagaattcgaaccaatattaagtgagcatttggcatatcaatgggtttcccctgaacaagcaatccaaatgacaaaatcttccaataacgcggaagcaattagaaaatatattcttaaagataaatag

SEQ ID NO: 628 - protein, 148 aa, Haemophilus influenzae
MMQYKNNQSVLVVIYTKDTNRVLMLQRQDDPDFWQSVTGTIESGETPKKTAIRELWEEVRLEISENSTALFDCNESIEFEIFPHFRYKYAPNVTYCREHWFLLAMEQEFEPILSEHLAYQWVSPEQAIQMTKSSNNAEAIRKYILKDK

SEQ ID NO: 629 - DNA, 1767 bp, Haemophilus influenzae
atgatgcgtacacattattgcggagcattaaaccgtaacaatatcgggcaagacgtaacattaagcggttgggttcatcgccgtcgtgatttaggtggcttgatttttattgatatgcgcgatcgtgatggcattgtgcaagtttgttttgatccgaaatatcaagatgcattgacagcggctgctgggctacgtaatgaattctgtattcaaattaaaggcgaagtgattgcacgtcctgaaaaccaaatcaataaaaatatggcaacaggcgaagtggaagtgttagcgaaggaattgcgtgtttacaatgcttctgatgtgttgcctctcgactttaaccaaaacaatactgaagaacaacgtttaaaatatcgttatttagatttacgtcgtcctgaaatggcgcagcgtttgaaaacccgtgcaaaaatcaccagctttgtgcgtcgctttatggatgataatggtttccttgatattgaaaccccaatgttaaccaaagcaacgccagaaggcgcgcgtgactatttagtgccaagccgtgtgcataaaggcaaattctatgcattgccgcaatcaccacagcttttcaaacagcttttaatgatgtctggttttgaccgctattatcaaatcgtaaaatgtttccgtgatgaagatttacgagcagatcgtcagcctgagtttactcaaatcgatgtggaaacctctttcttaactgcgccagaagtccgcgaaattatggaacgtatggtgcacggcttatggcttgataccattggtgtagatttaggtaaattcccagtgatgacttggcaagaagcaatgcgtcgttttggttcggataagccagatttgcgtaacccattagaaatggtagatgtagcagatattgtcaaagatgttgaatttaaagtatttaatgagccagcaaacaatccaaatggccgtgttgcagtcattcgagtaccaaatggtgcagaaattactcgtaaacaaattgatgaatatacacaatttgttggtatttatggtgcgaaaggtttggcttgggcaaaagtaaacgatattaatgctggtcttgaaggcgtgcaaagtccgattgcgaaattcttaaatgaagaggtatggaaagcgttagcagaacgtgtgaatgcacaaactggcgatattttattcttcggtgcagacaaatggcaaactaccactgatgcaatgggcgcgttacgtttgaaattaggtcgtgatcttggcttaactcgtttagacgaatggcaaccgctttgggtcattgatttcccaatgtttgaacgtgatgaagaaggtaatcttgcagcaatgcaccatccattcacttcaccaaaagatttcagcccagagcaattagaggctgatccaacaagtgcggtagccaatgcttacgatatggtcatcaacggctacgaagtgggtggtggttctgtgcgtatttttgatccgaaaatgcaacaaactgtgttccgtattcttggtattgacgaagaacaacaacgcgagaaattcggtttcttattagatgcgttaaaatttggtactccaccacatgctggtttagcattcggtttagaccgtttaactatgcttttaacaggcacggaaaacattcgcgatgtaattgcttttcctaaaactacggcagcagcgtgcttaatgacggaagccccgagttttgcaaatccgcaagcattggaagagttggcaatttctgtcgttaaagcagaataa

SEQ ID NO: 630 - protein, 588 aa, Haemophilus influenzae
MMRTHYCGALNRNNIGQDVTLSGWVHRRRDLGGLIFIDMRDRDGIVQVCFDPKYQDALTAAAGLRNEFCIQIKGEVIARPENQINKNMATGEVEVLAKELRVYNASDVLPLDFNQNNTEEQRLKYRYLDLRRPEMAQRLKTRAKITSFVRRFMDDNGFLDIETPMLTKATPEGARDYLVPSRVHKGKFYALPQSPQLFKQLLMMSGFDRYYQIVKCFRDEDLRADRQPEFTQIDVETSFLTAPEVREIMERMVHGLWLDTIGVDLGKFPVMTWQEAMRRFGSDKPDLRNPLEMVDVADIVKDVEFKVFNEPANNPNGRVAVIRVPNGAEITRKQIDEYTQFVGIYGAKGLAWAKVNDINAGLEGVQSPIAKFLNEEVWKALAERVNAQTGDILFFGADKWQTTTDAMGALRLKLGRDLGLTRLDEWQPLWVIDFPMFERDEEGNLAAMHHPFTSPKDFSPEQLEADPTSAVANAYDMVINGYEVGGGSVRIFDPKMQQTVFRILGIDEEQQREKFGFLLDALKFGTPPHAGLAFGLDRLTMLLTGTENIRDVIAFPKTTAAACLMTEAPSFANPQALEELAISVVKAE

SEQ ID NO: 631 - DNA, 519 bp, Haemophilus influenzae
atgttatttatcaatattacttttgcctgtattttagcgatccgtttttacagtctgtctatttcaattcgtcatgaaaaagcactcattgcaaagggtgcaatacagtatggtaaacgcaattccacactgttgtccattgcccatgttgcattttattttgcggcgatcattgaggctaataagcaaaacctgtcatttaatagcacttcacaaatagggttggcgattttaatttttgctattgcaatgctattttatgtgatttatgagctaaaagagatttggacagtaaaaatttatattttacctgaacatcaaattaatcgctctttcttgtttaaatacgtacgtcacccaaattatttcttaaacattattcccgaattaattggtttatcgcttttctgtcaggctaaatataccgcattggttggactacctatttatttgcttatcttagccgtgcgtattaaacaagaagagagtgccatgtcgcatttatttcctaaatcataa

SEQ ID NO: 632 - protein, 172 aa, Haemophilus influenzae
MLFINITFACILAIRFYSLSISIRHEKALIAKGAIQYGKRNSTLLSIAHVAFYFAAIIEANKQNLSFNSTSQIGLAILIFAIAMLFYVIYELKEIWTVKIYILPEHQINRSFLFKYVRHPNYFLNIIPELIGLSLFCQAKYTALVGLPIYLLILAVRIKQEESAMSHLFPKS

SEQ ID NO: 633 - DNA, 726 bp, Haemophilus influenzae
atggtaaaagatactctattttctacccccattgctaaattgggggattttatctttgacgaaaacgttgctgaagtctttccagatatgattcaacgttccgtgcctggctattccaacattattacggcaatcggtatgctggcagaacgtttcgtcacggctgatagtaacgtttatgatctaggttgctcacgaggagctgccacactttctgcacgtcgaaatattcatcaacccaacgtaaaaattattggtatcgataattctcaaccgatggttgaacgttgtcgccaacatattgcggcatatcatagtgagataccagtagaaattctctgtgaggatattcgccacgttgaaattaaaaatgcctcaatggtcattctcaacttcaccttgcaatttttaccgcctgaagatcgcgtggcattgctcacgaagatttatgaaggattaaatccaaatggcgtattaatactttctgaaaaattccgttttgaagatactaaaattgatcatttactcattgacttgcaccatcaattcaaacgtgccaatggttatagcgaattagaagtgagccaaaaacgcaccgcacttgaaaatgtgatgcgtacagattctatcgagacacacaaagtgcggttaaaaaacgtaggattttcacaagtagaactttggttccaatgctttaattttggctcgatgattgcagttaaataa

SEQ ID NO: 634 - protein, 241 aa, Haemophilus influenzae
MVKDTLFSTPIAKLGDFIFDENVAEVFPDMIQRSVPGYSNIITAIGMLAERFVTADSNVYDLGCSRGAATLSARRNIHQPNVKIIGIDNSQPMVERCRQHIAAYHSEIPVEILCEDIRHVEIKNASMVILNFTLQFLPPEDRVALLTKIYEGLNPNGVLILSEKFRFEDTKIDHLLIDLHHQFKRANGYSELEVSQKRTALENVMRTDSIETHKVRLKNVGFSQVELWFQCFNFGSMIAVK

SEQ ID NO: 635 - DNA, 408 bp, Haemophilus influenzae
atgcaaattttacacactatgttacgcgtgggcgatttagatcgttcaatcaaattttatcaagatgttttaggtatgcgtttattacgcaccagtgaaaacccagaatacaaatatacgctggcttttttaggttacgaagatggcgaaagtgcggcagaaattgaattaacatacaactggggcgtagataaatatgaacatggcacagcatatggacatatcgctatcggcgtggatgatatttatgcgacttgtgaagccgttcgcgcgagcggtggtaacgttactcgcgaagcagggccagttaaaggtggctcaaccgtcattgcttttgttgaagatccagatggttataaaattgaatttatcgaaaacaaaagtactaaatctggtttaggcaactaa

SEQ ID NO: 636 - protein, 135 aa, Haemophilus influenzae
MQILHTMLRVGDLDRSIKFYQDVLGMRLLRTSENPEYKYTLAFLGYEDGESAAEIELTYNWGVDKYEHGTAYGHIAIGVDDIYATCEAVRASGGNVTREAGPVKGGSTVIAFVEDPDGYKIEFIENKSTKSGLGN

SEQ ID NO: 637 - DNA, 690 bp, Haemophilus influenzae
atgtccgattctcaagaaatcccttatcacaaccaattaaaaaatcgctttcgtggctatttccccgtcattattgatgttgaaactgcaggttttgatgcaaaaaaagatgcgttactcgaactagccgccatcacattaaaaatggatgaaaacggttatttgcatcctgatcagaaatgccattttcatatcaagccttttgaaggtgcaaatattaatccagaatccttgaaatttaatggtattgatattcacaatccactacgtggcgcggtgtctgaactcgatgcaatcacgggattatttcaaatggtgcgtcgaggacaaaaagatgcggattgccaacgttctatcattgtggcacacaatgccacttttgaccaaagttttgtgatggctgccgctgaacgtactggcgtaaagcgtaatcccttccacccttttggcatgtttgataccgcaagtttagcgggcttaatgtttggtcagactgttctcgttaaagcctgtcttgctgctaaaatcccatttgatgggaaacaagcccattcagcgctatatgataccgaacgcacggcgaaattattctgctatatggtcaatcatttaaaagatttaggtggtttcccacatattgcttctgaactagaacaggaaaaaacaactgaaaaagagaccgcactttaa

SEQ ID NO: 638 - protein, 229 aa, Haemophilus influenzae
MSDSQEIPYHNQLKNRFRGYFPVIIDVETAGFDAKKDALLELAAITLKMDENGYLHPDQKCHFHIKPFEGANINPESLKFNGIDIHNPLRGAVSELDAITGLFQMVRRGQKDADCQRSIIVAHNATFDQSFVMAAAERTGVKRNPFHPFGMFDTASLAGLMFGQTVLVKACLAAKIPFDGKQAHSALYDTERTAKLFCYMVNHLKDLGGFPHIASELEQEKTTEKETAL

SEQ ID NO: 639 - DNA, 1353 bp, Haemophilus influenzae
atgttatcaaaccctgttgttatctcaatcatcgttttgctggcacttagtttgctacgcatcaacgttattatcgcactggtgattgctgcgcttaccgcaggatttatcggtgatttaggtttaactaaaaccatcgaaacctttacaggcggcttaggtggcggtgctgaagtcgcaatgaactatgcaatacttggagcgttcgccattgctatttctaaatcaggcattactgatttaatcgcttataaaatcatcacaaaaatgaataaaacaccaactgctggcaatttaacttggtttaaatatttcatttttgcggtattggcattgtttgccatctcctctcaaaacttacttccagtgcacattgcttttattccaatcgttgtaccaccactactttcaatctttaaccgtttaaaaattgatcgccgtgcagtagcttgcgtacttacatttggtttaactgctacctatatgttattaccagtaggctttggaaaaatctttattgaaagtattttagttaaaaacattaatcaagctggcgcaaccttaggtttacaaacaaatgtagcacaagtttctttagcaatgttgttacctgttattggcatgattttaggcttactcatagccgtatttattacctaccgtaaaccacgtgaatacaatatcaatgttgaagaagcaacaactaaagatattgaagctcacattgctaatattaaaccaaaacaaattgttgcaagtttaatcgcaattgtcgcgaccttcgcaacacaattagtcacaagttcaactatcattggcggtttaattggcttaattattttcgtactatgtggcattttcaaactaaaagaaagcaacgatatttttcaacaaggcttgcgcttaatggcaatgattggctttgtaatgattgctgcttcaggttttgcaaatgtgattaatgccaccactggcgtaacagatttagtacaaagcctaagttctggtgttgtacaaagtaaaggtattgccgcattattaatgcttgtcgttggtttattaattacaatgggtattggatcatcattctctacagtaccgattattacatcaatttacgtaccactctgtttatcttttggtttttctccgttagcaacaatttcaattgtaggtgtagcggcggctttaggagatgcaggttcgcccgcatcagactcaacattaggcccaacatctggcttgaatatggatggcaaacacgatcacatttgggattctgttgtacctacctttattcactataatattccattattggtattcggctggattgcagcaatgtacctttaa

SEQ ID NO: 640 - protein, 450 aa, Haemophilus influenzae
MLSNPVVISIIVLLALSLLRINVIIALVIAALTAGFIGDLGLTKTIETFTGGLGGGAEVAMNYAILGAFAIAISKSGITDLIAYKIITKMNKTPTAGNLTWFKYFIFAVLALFAISSQNLLPVHIAFIPIVVPPLLSIFNRLKIDRRAVACVLTFGLTATYMLLPVGFGKIFIESILVKNINQAGATLGLQTNVAQVSLAMLLPVIGMILGLLIAVFITYRKPREYNINVEEATTKDIEAHIANIKPKQIVASLIAIVATFATQLVTSSTIIGGLIGLIIFVLCGIFKLKESNDIFQQGLRLMAMIGFVMIAASGFANVINATTGVTDLVQSLSSGVVQSKGIAALLMLVVGLLITMGIGSSFSTVPIITSIYVPLCLSFGFSPLATISIVGVAAALGDAGSPASDSTLGPTSGLNMDGKHDHIWDSVVPTFIHYNIPLLVFGWIAAMYL

SEQ ID NO: 641 - DNA, 588 bp, Haemophilus influenzae
atgactgttcaacaacttatccaacgcttagatcacaaagttcaacaactttatcaagctcatttatccaaacgagaagaaaaaatcttcgccaaatttgaccgcactttgttcagtgaaaatggacagagtgtttccttttatctaaaagaaatcaatcaaacgctagatagaataaagacattagagtctaacgattctaatcactataattttctagctgagcgtttactcgcccaatgttccgttctttcggaagctttagttcgcaagaatactcatctaactgaatcccaaacaacaacgaaacaaaccattcaaaaatctcaacatagcattcataaattaccaccaagagaacgcctagaaaaatattacgaagcacgagaacaattgaataatctttatcgacagcataaagatttagcacaagctgaaaaaaataatgatgaaaaaatacgttatgctcaacttgcagaagtttataaaaaacgccagcaaaaatgccaagatgcaatcgatcttttagaagaatatttggtgtttaaagaagaagtggaaaaccgtgaaaatacggaaaacaaatga

SEQ ID NO: 642 - protein, 195 aa, Haemophilus influenzae
MTVQQLIQRLDHKVQQLYQAHLSKREEKIFAKFDRTLFSENGQSVSFYLKEINQTLDRIKTLESNDSNHYNFLAERLLAQCSVLSEALVRKNTHLTESQTTTKQTIQKSQHSIHKLPPRERLEKYYEAREQLNNLYRQHKDLAQAEKNNDEKIRYAQLAEVYKKRQQKCQDAIDLLEEYLVFKEEVENRENTENK

SEQ ID NO: 643 - DNA, 567 bp, Haemophilus influenzae
atggctacatatactaccagtgatttcaaaccaggtctaaaatttatgcaagacggcgagccttgtgtcatcgttgaaaatgaatttgtaaaaccaggcaaaggtcaggcattcactcgtactcgtattcgtaaattaatttcaggcaaagtattagacgtaaactttaaatcaggcacttcagttgaagctgctgatgttatggatcttaacttaacttattcatacaaagacgatgctttctggtactttatgcacccagaaacatttgaacagtactctgcagatgcaaaagccgtaggcgatgcagaaaaatggttattagaccaagcagattgtgtcgtgactttatggaatggtgcgccaattactgttacgccaccaaactttgttgaattagaaatcgtcgatacagacccaggtcttaaaggcgataccgcaggcactggcggtaaacccgcaacattaagcacaggcgcagttgtaaaagtacctcttttcgttcaaatcggtgaagtaatcaaagtcgatactcgttctggcgaatacgtctctcgcgtaaaataa

SEQ ID NO: 644 - protein, 188 aa, Haemophilus influenzae
MATYTTSDFKPGLKFMQDGEPCVIVENEFVKPGKGQAFTRTRIRKLISGKVLDVNFKSGTSVEAADVMDLNLTYSYKDDAFWYFMHPETFEQYSADAKAVGDAEKWLLDQADCVVTLWNGAPITVTPPNFVELEIVDTDPGLKGDTAGTGGKPATLSTGAVVKVPLFVQIGEVIKVDTRSGEYVSRVK

SEQ ID NO: 645 - DNA, 1017 bp, Haemophilus influenzae
gtgcgtattttaccccaagaacccgtcattagagaagaacaaaattggctcacaattctaaaaaatgccatttcagatcctaaattattgctaaaagccttaaatttaccagaagatgattttgagcaatccattgctgcacggaaactgttttcgcttcgcgtgccacaacctttcattgataaaatagaaaaaggcaatccgcaagatccgcttttcttgcaagtgatgtgttctgatttagaatttgtacaagccgaaggatttagtacggatcccttagaagaaaaaaatgccaatgcggtgccaaatattcttcataaatatcaaaatcgcttgctctttatggcgaagggtggttgtgcggtgaattgtcgttattgcttccgccgacattttccttacgatgaaaacccaggaaataaaaaaagctggcaactggcgttagattacattgcggcgcattctgaaatagaagaagtgattttttcaggcggtgatcctttaatggcgaaagatcacgaattagcgtggttaataaaacatttggaaaacataccgcacttacagcgtttgcgtattcacacccgtttgcctgttgtcattccgcaacggattactgatgaattttgcactttattagcagaaagtcgtttgcaaacagttatggtgacacacattaatcatccgaatgaaattgatcaaatttttgctaatgcgatgcaaaaattaaatgccgtgaatgtcacgcttttgaatcaatctgttttgctaaaaagcgtgaatgatgatgcgcaaattctaaaaatattgagcgataaactttttcaaactggcattttgccttattacttgcatttgctggataaagtgcaaggggcgagccattttttgattagcgatattgaagctatgcaaatctataaaaccttgcaatctctgacatctggctatcttgttcctaaacttgcacgagaaattgcgggcgagccaaataagactttatacgcagaataa

SEQ ID NO: 646 - protein, 338 aa, Haemophilus influenzae
MRILPQEPVIREEQNWLTILKNAISDPKLLLKALNLPEDDFEQSIAARKLFSLRVPQPFIDKIEKGNPQDPLFLQVMCSDLEFVQAEGFSTDPLEEKNANAVPNILHKYQNRLLFMAKGGCAVNCRYCFRRHFPYDENPGNKKSWQLALDYIAAHSEIEEVIFSGGDPLMAKDHELAWLIKHLENIPHLQRLRIHTRLPVVIPQRITDEFCTLLAESRLQTVMVTHINHPNEIDQIFANAMQKLNAVNVTLLNQSVLLKSVNDDAQILKILSDKLFQTGILPYYLHLLDKVQGASHFLISDIEAMQIYKTLQSLTSGYLVPKLAREIAGEPNKTLYAE

SEQ ID NO: 647 - DNA, 1323 bp, Haemophilus influenzae
atggataaaaatcaacaatcatctcaaaatgaattagatttagggcttaatcaagagccaattacaccaaagaaaacaattcagccaagttcgtcaattttaggtaaaacaaaagggttatttgccaaaaaaaatcatgcgcaaactaactttcagcaacgtaaagaacctacttttggcgattcatcaacgcaagaaaatgatcctttaattccgagtgaaaatttgaaaacagtgcaaaagcctgttcttcaaacttcttccacagaagaaaatatttctgcggttgatgaagaaatcagtgctgaaaataacgcggatgaacccgtcgaaaaggctgaaaaacctattttagctcaaccagaaaaatggaaaatattacaagtattgccagcaaaacatcgccgtttatttatggctattttggtgttggttattttattgattattttcttcgcattaaaaccaagttctgacaccgttgagtctttcactcaatctaacagcaatgaaattcctgtgcagttccaatcgttagatcaaagtcagccagtggaaaccacgattttagataatcctcctgcacaaaatcaaatagctgcagagcaagctaaccaacctgaatctgcgccaaaagcagaggaagcggcgaataatacgacggctcaaaacccattagtagaaaatgcgccaatgcaacaaaatgttgttcaagctccaagtcaaatgccaaatgaaatgactgcggcatctgttgcgcctatgcaaccagctcaagcagaacagcctcaaatgcaagctgcacaaacgcaagcagaacagccaaaaacaactgcgctagttcagccgataaaaaaagcggtagagccacaagttgcgcataaagatactgtgaaaaaagaagtgaaagtggcggagaaagcacaggctccatcaaaagcaacggaacaaaacgtcgctaaaacagcaggaaacgcaccgattgttgaagccaaacctgttcaagctaaaaaagaaaagaaagttcaaatcgttgatgcaaaacctgtgagtaaatctacagcttctcgtctttctgcaaaaacattaactgtgccgaaaggtgtttcactgatgcaagtcttccgtgataatcaacttaatatttccgatgtaaacgcaatgagcaaagcggcaggggcgggaaatgttttaagtagctttaaatctggcgataaagtaacggtatctgtgaataatcaagggcgagtaaatgaaatgcgtttatccaatggtgcgcgttttgtgcgtcagtctgatggttcttatcaatataaaaaataa

SEQ ID NO: 648 - protein, 440 aa, Haemophilus influenzae
MDKNQQSSQNELDLGLNQEPITPKKTIQPSSSILGKTKGLFAKKNHAQTNFQQRKEPTFGDSSTQENDPLIPSENLKTVQKPVLQTSSTEENISAVDEEISAENNADEPVEKAEKPILAQPEKWKILQVLPAKHRRLFMAILVLVILLIIFFALKPSSDTVESFTQSNSNEIPVQFQSLDQSQPVETTILDNPPAQNQIAAEQANQPESAPKAEEAANNTTAQNPLVENAPMQQNVVQAPSQMPNEMTAASVAPMQPAQAEQPQMQAAQTQAEQPKTTALVQPIKKAVEPQVAHKDTVKKEVKVAEKAQAPSKATEQNVAKTAGNAPIVEAKPVQAKKEKKVQIVDAKPVSKSTASRLSAKTLTVPKGVSLMQVFRDNQLNISDVNAMSKAAGAGNVLSSFKSGDKVTVSVNNQGRVNEMRLSNGARFVRQSDGSYQYKK

SEQ ID NO: 649 - DNA, 405 bp, Haemophilus influenzae
atgttgaaaaaaacatcccttatttttaccgcacttttgctggttggctgtgtgcaaaatgcgaatgtgacaacgccccaagcgcaaaaaatgcaagtagaaaaagtggataaagccttacaaaaaggcgaagctgaccgatatttatgtcaagatgataaagttgttcgtgttatacacgccacgcataaaaaatacaaaaaaaatttgcactatgttaccgtcacttttcaaggcatatcagaaaaactaaccttaatgatttctgaacgtggtaaaaattacgccaatattcgttggatgtggcaagagcgtgatgattttagtacgctaaaaacgaatctcggcgaaattttagcaacgcaatgtgtctcacaaacaagtgaacgcttatctggacaataa

SEQ ID NO: 650 - protein, 134 aa, Haemophilus influenzae
MLKKTSLIFTALLLVGCVQNANVTTPQAQKMQVEKVDKALQKGEADRYLCQDDKVVRVIHATHKKYKKNLHYVTVTFQGISEKLTLMISERGKNYANIRWMWQERDDFSTLKTNLGEILATQCVSQTSERLSGQ

SEQ ID NO: 651 - DNA, 645 bp, Haemophilus influenzae
gtggatttgtttactgaagaaagtgggcgtttaaccgtaattgcaaaaggggcgcgcgcaaagcgttcatcttggaaatcggttttgcaacctttcacacctttattgttgcgttggacgggaaaaagcacattgaaaaccctcactaaagctgaacctgccgcaattacactgcctttacaacaaatcgccctttatagtggattttatgtaaatgaattactcactcgtgttattgagtctgaaacgccaaatcctgcgctttttcaacattatttaaaatgcttaacgggcttggcaacggaaactaatattgagccaacgttgcgtctttttgaatttcaacttttacaaattcttggttacggcgtggattttctgcattgtgctggttctggcgagccagtggatttctcaatgacatatcgttatcgtgaggaaaaaggtttcattgcgtctttagtgaaagataatctcacgttttacggcagagatttgttagcctttgaagcccttgatttttctgatgatgcggtacgtcaagcggcaaaacgttttactcgtattgcactgaaaccttatcttggcgataaaccgctaaaaagccgagagctattcactcaaaatattttacttttaaaataa

SEQ ID NO: 652 - protein, 214 aa, Haemophilus influenzae
MDLFTEESGRLTVIAKGARAKRSSWKSVLQPFTPLLLRWTGKSTLKTLTKAEPAAITLPLQQIALYSGFYVNELLTRVIESETPNPALFQHYLKCLTGLATETNIEPTLRLFEFQLLQILGYGVDFLHCAGSGEPVDFSMTYRYREEKGFIASLVKDNLTFYGRDLLAFEALDFSDDAVRQAAKRFTRIALKPYLGDKPLKSRELFTQNILLLK

SEQ ID NO: 653 - DNA, 1317 bp, Haemophilus influenzae
atggttcttctttataccccaaagcaaaaaacaaaaaatgttcaaaccattaccgctgatattcttgatttagattatcaaggtttaggcgtggcgaaaattaatggtaaaacttggtttattgaaaatgcacttccgcacgaaaaagtggaatgtcgtattctggaggataaacgccaatatgggcatgctacggcaaaaaaatggcgagtaaaaagttctgaacgtttagaacctaaatgtgctcattttatgcgttgtggtggttgccaaggacagcatattcctattgaaatgcagaggaaagcgaaacaatccgcattgtttaagcggttaagtaaattacagtcagaaccgatttcatttcaacctatgatttgtggcgatgcttgggcgtatcgtcgtcgtgtgcgtttgagtttatggtttaacccaagcacaaaacaaatcgacatgggctttcgtcagaaaaataccaacgatttaatacccgttcaatcttgcgaagtagcagaacctgcaattaattatttactgcctaaattaaccgcacttttagaaaaattttcagcaccgaaacagcttgggcatattgaattggtggctgccgataatggcgtcgcaatgttgttacgttacaccaaaaaccttgcggaaattgaccgcactttattgctcaaatttgctgaacaagaaaagttaatgctgtttttacaaagcgacaaaggcattgaacaaatctatggcgatgcgccttattatcaattttctgatggcataaaattacattttgatattcgtgattttattcaagtaaatagtgcattaaatgaacgtatggtcaatacagcgttggattggcttgaattgagccaacaagattgcgtgctcgatttattttgcggcatgggaaattttacgcttcctcttgccaaacgcgtgaaaagtgcggtaggaattgaaggtgtttttgaaatggtacaaaaagcggcgcaaaatgccgcaagaaaccaaatcaaaaatattgaatttttccaagccgatcttgaccaatcctttgttgaacaaccttgggctaatcagtcgttcaataaaattttgcttgatcctccacgcagtggcgcagctttcgcgttaaatgctttgtgcgagctgaaagcagagaaaattttatatgtgtcttgtaatcccgcaacattagtgcgcgatgcggaaattttacgtgattttggctacaagattgaaaaaagtgcggtgatagatatgttccctcatacggggcatttggaatcgataaccttattcactacaaaataa

SEQ ID NO: 654 - protein, 438 aa, Haemophilus influenzae
MVLLYTPKQKTKNVQTITADILDLDYQGLGVAKINGKTWFIENALPHEKVECRILEDKRQYGHATAKKWRVKSSERLEPKCAHFMRCGGCQGQHIPIEMQRKAKQSALFKRLSKLQSEPISFQPMICGDAWAYRRRVRLSLWFNPSTKQIDMGFRQKNTNDLIPVQSCEVAEPAINYLLPKLTALLEKFSAPKQLGHIELVAADNGVAMLLRYTKNLAEIDRTLLLKFAEQEKLMLFLQSDKGIEQIYGDAPYYQFSDGIKLHFDIRDFIQVNSALNERMVNTALDWLELSQQDCVLDLFCGMGNFTLPLAKRVKSAVGIEGVFEMVQKAAQNAARNQIKNIEFFQADLDQSFVEQPWANQSFNKILLDPPRSGAAFALNALCELKAEKILYVSCNPATLVRDAEILRDFGYKIEKSAVIDMFPHTGHLESITLFTTK

SEQ ID NO: 655 - DNA, 2232 bp, Haemophilus influenzae
atggttgctgttcgtggttcgcatttgttaaatccgcagaattttgtgattgaacaatggtgcgctggcttaaaactagcagaacaaacagaaaaaagtttgatcgatgcgtggtattacgcacgtgatttaatgaatgcctatcccgatgaaatgaagaatgcgaccttaatgctgcagtctggcgtggaaatggtagaaattttgcacgaacttaatatggatgcggaaacattgcttactgccatgttgtttcctattgttgcaaataaattaacagactgggaaagtctaaaagaaaaatttggtgcgaaaattactaaattacttaaaggcgtgttggagatggataatattcgccaacttaatgccagtcattccgctaacgctctgcaagtggataatgttcgccgtatgttgttggcaatggtggacgatttccgctgcgtgatcatcaaacttgccgaacgtattactttcttgcgtgatgcagagtatcgttgtgcagaggaagacaaagtccttgccgtcaaagaatgttcttatatttatgcccctcttgccaatcgtcttggaattggtcagctgaaatgggagttagaggattactgcttccgttatctccatcctgaacaatatcgcgctattgctaaattattacaggaacgtcgtcttgatcgtgaacattacattgctgatttcgtcagtgagttgagcagttatttacgtgaaaatatcaagcaagtggaagtgtacggccgtccgaaacatatttacagcatttggcgcaaaatgcagaaaaagaatcttgagttcagcggtttatatgatgtaagagcggtcagaattatcgtgcaaaaattgcaagattgttacaccgcacttgggattgttcatactcaatttaaacacttgcccaaagaatttgacgattatgtggcgaacccgaaaccgaacggttatcaatctattcatactgttgttttaggtaaaggtggcaagccaattgaagtacaaattcgaacccaacaaatgcatgatgatgcagagttaggtatggcggcacactggaaatataaagaaggcaatacaggcagtatgtcggcctatgaagaaaaaattgcgtggttgcgtaaattgttagcttggcaagatgatattacggattctggcgaagtgatggcagagttgcgtagccaagtgtttgatgaccgtgtatatgtgtttacgccaaagggcgaagtggtggatttgccaacgggatctacaccattagattttgcttatgccattcatagtgaaattggtcatcgctgcatcggggcaaaagtggcaggacgtattgtgccatttacctatcagctacaaatgggcgatcaaatcgatattattacccagaaaaatccgaacccgagccgtgactggttaaacccaaatttaggatttacccatacgtcaaaatctcgcgcaaaaatccaagcgtggtttaaaaaacaagatcgcgataaaaatattccagcgggtaaagaattactcgataatgaactcacgcttttgaatttaagtattaagcaagtggaaccttatgcgttaccacgctataacttgaaaaatttggacgatctttatgcaggtattggcagtggcgatattcgtttaaataacttaatccatttcttgcaaagtaaattgattaaagtgactgctgaagaagcggatcaagagattttgcgtcatgttgctaataaaagtgcggtcaattctcagcagaaatctgaaaagaacaatggctatgtgattgtggagggcgtgggcaatcttatgcatcatattgcgcgttgctgccagccgataccaggcgatgcgattgttggctatattacaatgggacgtggtatttctattcaccgagcggattgtgaacaattcttagatttgcaagcggctcatccagaacgcgtggtggaatcaatttggggcgaaaattacgcaagtggtttccatattaatatccgtattgtggcaggcgatcgcaatggcttattacgtgatattacgacggttctggcaaatgaaaaaattagcgtgttaggggtctcaagccgtgctgataccaaaaaacagcttgctaccattgatatggaaattgaactccataatgttgaaagtttaagtaaaatattggctcgattagcaaaattagatgatgttatcgaagcgaaacgtttataa

SEQ ID NO: 656 - protein, 743 aa, Haemophilus influenzae
MVAVRGSHLLNPQNFVIEQWCAGLKLAEQTEKSLIDAWYYARDLMNAYPDEMKNATLMLQSGVEMVEILHELNMDAETLLTAMLFPIVANKLTDWESLKEKFGAKITKLLKGVLEMDNIRQLNASHSANALQVDNVRRMLLAMVDDFRCVIIKLAERITFLRDAEYRCAEEDKVLAVKECSYIYAPLANRLGIGQLKWELEDYCFRYLHPEQYRAIAKLLQERRLDREHYIADFVSELSSYLRENIKQVEVYGRPKHIYSIWRKMQKKNLEFSGLYDVRAVRIIVQKLQDCYTALGIVHTQFKHLPKEFDDYVANPKPNGYQSIHTVVLGKGGKPIEVQIRTQQMHDDAELGMAAHWKYKEGNTGSMSAYEEKIAWLRKLLAWQDDITDSGEVMAELRSQVFDDRVYVFTPKGEVVDLPTGSTPLDFAYAIHSEIGHRCIGAKVAGRIVPFTYQLQMGDQIDIITQKNPNPSRDWLNPNLGFTHTSKSRAKIQAWFKKQDRDKNIPAGKELLDNELTLLNLSIKQVEPYALPRYNLKNLDDLYAGIGSGDIRLNNLIHFLQSKLIKVTAEEADQEILRHVANKSAVNSQQKSEKNNGYVIVEGVGNLMHHIARCCQPIPGDAIVGYITMGRGISIHRADCEQFLDLQAAHPERVVESIWGENYASGFHINIRIVAGDRNGLLRDITTVLANEKISVLGVSSRADTKKQLATIDMEIELHNVESLSKILARLAKLDDVIEAKRL

SEQ ID NO: 657 - DNA, 357 bp, Haemophilus influenzae
atgtataaaacgacggggctaacccatttaatcaattccacgaaatattcgttacaaggcttaaaaagtgcgtttaaaaatgaaacggcttttcgccacgaatgttttttagcctgcattttaattcctcttactttctttttaggcgaaacaaaaattgaaattatattgatgatttcttctgttttgcttgtgatggcgttagaacttttaaacagtgcggtagaggcagttgttgatcgcattggtacagaacgccacgaactttcagggcgtgcgaaagatcaaggttctgcatcggtatttattgccctttgtattgtcggtatcgtttggggcggaattttattcttctag

SEQ ID NO: 658 - protein, 118 aa, Haemophilus influenzae
MYKTTGLTHLINSTKYSLQGLKSAFKNETAFRHECFLACILIPLTFFLGETKIEIILMISSVLLVMALELLNSAVEAVVDRIGTERHELSGRAKDQGSASVFIALCIVGIVWGGILFF

SEQ ID NO: 659 - DNA, 594 bp, Haemophilus influenzae
atgaccgcacttttaaaaattggtctggtgtctgtttctgatcgcgcatcagcaggcgtgtatcaagatcaaggtatcccagaattacaggcttggttagaacaagcgttggtagatcccttccatttggaaacaagattaatccctgatgaacaaccgattattgaacaaaccttaaaagagctagtggatgaacaaggttgccatttagtgctgacaactggtggaactgggccagcaaaacgcgatgtaacgcctgatgcaacccttgctgtagcggatcgagaaatgccgggttttggcgaacaaatgcgtcaagtgagtttgcattttgtgcctaccgcaattttatcccgccaagtgggtgtgattcgtaaggaaagcttgattttaaatcttcctgggcagcctaaagcgattaaagaaaccttggaaggcgtgaaagataaagaaggaaatgtgcttgtaaaaggcatttttagcgcagtgccttattgtttgcaactgattaacggcttatatattgataccaagcctgaaatcatcgaaagtttccgtcctaaatccgcaagacgcgaaaatctggagaaatag

SEQ ID NO: 660 - protein, 197 aa, Haemophilus influenzae
MTALLKIGLVSVSDRASAGVYQDQGIPELQAWLEQALVDPFHLETRLIPDEQPIIEQTLKELVDEQGCHLVLTTGGTGPAKRDVTPDATLAVADREMPGFGEQMRQVSLHFVPTAILSRQVGVIRKESLILNLPGQPKAIKETLEGVKDKEGNVLVKGIFSAVPYCLQLINGLYIDTKPEIIESFRPKSARRENLEK

SEQ ID NO: 661 - DNA, 339 bp, Haemophilus influenzae
atgaaaaaaatcgaagcaatgattaaaccctttaaattagacgatgtgcgagaaagtctttcagatattggtatttcaggtatgacaatcacggaagtacgcggatttggtcgccaaaaaggtcatacagaactttatcgtggtgcggaatatatggtggattttctgccgaaagtgaaattggaagtagtggttcccgatgaacttgtggatcaatgtattgaagcgattattgaaacggcacaaacaggtaaaatcggtgacggcaaaatttttgtttatcacgttgagagagcgatccgcattcgcacgggcgaagaaaacgaggatgcgatttag

SEQ ID NO: 662 - protein, 112 aa, Haemophilus influenzae
MKKIEAMIKPFKLDDVRESLSDIGISGMTITEVRGFGRQKGHTELYRGAEYMVDFLPKVKLEVVVPDELVDQCIEAIIETAQTGKIGDGKIFVYHVERAIRIRTGEENEDAI

SEQ ID NO: 663 - DNA, 1047 bp, Haemophilus influenzae
gtgcaaaataatttaaatttacaccgcactctgcttggcattgcctcggtgattattatcttagctggcgtaaaattggcggcagaaatcgtggtgccattcttgctatcactctttattgcgataatttgctcgccgatgattaaggggatgacgcaacgccgaattccccattggctggccattactttgcttttcgtcttgatttctttggtgtttttcttcttagctgggctgattaacagcactgcaagagaatttactcaatcaattccacaatataaagttttgctttcacaacgcgtgagtgatttaactggattgttgcaacgtttcaatctgcctttcacgctttcgcgtgaaaccatccaagaaaattttgatccaagcatcattatgaattttgtaagccgagtattgctaaatttctctggagtggtgagtaatgtgtttgttttagtgttggtcgtgatttttatgcttgctgaagcgccaacgatgaaacataaatttgcaatggtaattagttcaacacctcatgatgcagtcaaagaagaacgccatattgatcgcgttttacaaggcgtaattggttatcttggcattaaaagtatcacgagtttgcttactggcgttggtatttttattttgttggaagcctgtggggttcaatatgccattttgtgggcaaccttgagtttcttgttgaattatattccgaatattggttctatcatcgcggctattccgattattgtgcaagccttattactaaatggttttggcattggctttggcgtagcaatcggtgttattgcgattaatatggttgtcggtaacattattgaacctaaaatgatggggcaacgattagggctttcaactttagtggtgttcctttcattattgttttggggatggttactgggaaccgtgggaatgctactgtctgtccctctgacgatggcattaaaaattgccttagagtccagccccaatacggcgaaatatgcctgtctattaggagatgtcgaagatttcaaatag

SEQ ID NO: 664 - protein, 348 aa, Haemophilus influenzae
MQNNLNLHRTLLGIASVIIILAGVKLAAEIVVPFLLSLFIAIICSPMIKGMTQRRIPHWLAITLLFVLISLVFFFLAGLINSTAREFTQSIPQYKVLLSQRVSDLTGLLQRFNLPFTLSRETIQENFDPSIIMNFVSRVLLNFSGVVSNVFVLVLVVIFMLAEAPTMKHKFAMVISSTPHDAVKEERHIDRVLQGVIGYLGIKSITSLLTGVGIFILLEACGVQYAILWATLSFLLNYIPNIGSIIAAIPIIVQALLLNGFGIGFGVAIGVIAINMVVGNIIEPKMMGQRLGLSTLVVFLSLLFWGWLLGTVGMLLSVPLTMALKIALESSPNTAKYACLLGDVEDFK

SEQ ID NO: 665 - DNA, 2286 bp, Haemophilus influenzae
ttgtgtcataaaaatcttgttcgtgaaaaaaattggcggcgattataccaatttttctcgtataatagggcaaattttttcccaaggttgattatgaaaattgtccgagtggcactggctgtgccgcttcctcgcttatttgattatttcgtccccgatgatgtttcattacaaatcggtatgcgtgttcttgtgccttttggcacccaaaaacgtgtcgccattgtggctgattttccgacaaaatcggacgtgccagaaaataaactcaaagcaattattcacgccttagatttagccccactttttacgcccatttattgggattggcttcattgggcagcaaattattatcaagcgggattaggcgatgtgttatttcaagccttgcctgtgaaattgcgtaacggcgaaagtgcggtaaaaaatgaccgcactttttggcgaattacggatgcggggaaaaatgcccttgaacaaggcgaattaaaacgctcgaaaaagcaagttgaagccctacaatgcttatctgaaactgatcttgaaaaaggcaataataatttttcctctgccatttggtcagccttaaaagccaaagggtttattgaggaaattactatccaaacaaatcccctaagctggcaacaaagattaggcaataacccaattgtcaatgctgaaaatcgtttaaccttaaataagcagcaagccttagccttcagccaactgctcttccattctggtttcaatgtatggctgctcgatggcgtgactggttcaggtaaaacagaaatttatctgcagtatattgaagaaattttaaaatcgggtaagcaagtattagtgcttgtacccgaaatcgggctaacacctcaaacggtacaacgtttcaaagcgcgtttcaatgtagaaattgatgtactgcattctaatttaaccgatacgcaacggctttatgtatgggatcgcgcccgctctggacaaagtgctattgtgattggcactagatcggcattgttcacgcaattttctaatcttggtgcaattattttggacgaggaacaggatgcgtcttacaaacagcaagacagttggcgttatcacgcacgagatttagcaatcgtgcttgctcaaaaactgaacatttcagtattaatgggttctgccacgccaagtttagaaagtattaataatgtacaaaacggcaaataccaacatttagttttatcaaaaagagcgggaaattctaccgcacttcgtcatttcgttgttgatttgaaaaatcaaaacatacaaaacgggctttcgaaacccttattagaacggatgaaagttcacctcgaaaaaggcaatcaagtattgcttttcttaaatcgtcgtggctttgcgcccgtattgctttgccatgaatgtggttggattgcacaatgccctcattgtgaaaaaccttatacctatcatcagcatcaaaatgtattgcgttgtcatcattgtggcgcgcaaaaaactattcctcgccaatgtggcgattgcggttctacccatttagttactactggtctcggcacagagcaattagaagaaaccttgaaaacgctatttcctcattattctgtagcgcgaatcgaccgcgatagcacggcgtgtaaaggaaaattggaaggttatttagaagatattcaacaaggcaaaagccaaattttgattggcacacaaatgcttgcgaaaggacatcattttccgaatgttactctcgttgccttagtgaatgtagatagtgcattattttcactggattttcgtgcagaagaacgtttagctcaactttatattcaagttgctggacgtgcaggacgtgccgataaacaaggtgaagtggtgctacaaacacattatccagatcatcctttactcactacattattagcgaatggctaccaagcttttgcaaaagaaaccttacaattacgccattcaatgggattgccgcctttcacttttcaggcgttattcaaagcacaggctcgacattctgagcttgcagaaaattgcttaagccaaattgcagatttttttcaatcgaagcaaattacgggattacaaatgcttggcccaatgcctgcaccgttcagcaaaaaagcggggcaatatcgctggcagttattattgcagcatccatcaagaatgacgttgcaaaaagcattaagagaatatcaacaagccgaactagaaaaaaacagccaagtgcggttaattttggacgtcgatccgcaagacttatcataa

SEQ ID NO: 666 - protein, 761 aa, Haemophilus influenzae
MCHKNLVREKNWRRLYQFFSYNRANFFPRLIMKIVRVALAVPLPRLFDYFVPDDVSLQIGMRVLVPFGTQKRVAIVADFPTKSDVPENKLKAIIHALDLAPLFTPIYWDWLHWAANYYQAGLGDVLFQALPVKLRNGESAVKNDRTFWRITDAGKNALEQGELKRSKKQVEALQCLSETDLEKGNNNFSSAIWSALKAKGFIEEITIQTNPLSWQQRLGNNPIVNAENRLTLNKQQALAFSQLLFHSGFNVWLLDGVTGSGKTEIYLQYIEEILKSGKQVLVLVPEIGLTPQTVQRFKARFNVEIDVLHSNLTDTQRLYVWDRARSGQSAIVIGTRSALFTQFSNLGAIILDEEQDASYKQQDSWRYHARDLAIVLAQKLNISVLMGSATPSLESINNVQNGKYQHLVLSKRAGNSTALRHFVVDLKNQNIQNGLSKPLLERMKVHLEKGNQVLLFLNRRGFAPVLLCHECGWIAQCPHCEKPYTYHQHQNVLRCHHCGAQKTIPRQCGDCGSTHLVTTGLGTEQLEETLKTLFPHYSVARIDRDSTACKGKLEGYLEDIQQGKSQILIGTQMLAKGHHFPNVTLVALVNVDSALFSLDFRAEERLAQLYIQVAGRAGRADKQGEVVLQTHYPDHPLLTTLLANGYQAFAKETLQLRHSMGLPPFTFQALFKAQARHSELAENCLSQIADFFQSKQITGLQMLGPMPAPFSKKAGQYRWQLLLQHPSRMTLQKALREYQQAELEKNSQVRLILDVDPQDLS

SEQ ID NO: 667 - DNA, 741 bp, Haemophilus influenzae
atgacacaaacttttgctgatcaaaaacgtaaaaccgttgaaaccgcagaatttaccgaagatggtcgctataagcgcaaagtccgtagttttgtgctccgcactggtcgtttgagcgaatttcaaagaaatatgatgaatgataactggggaacacttggtttagattaccaaacggaaccttttgattttgctaagatttatggcaatgataatccagttgtattagaaattggctttggaatgggaaaatcgctcgtggatatggcttttgctaatcctgacaaaaattaccttggcattgaagttcatactcctggcgttggtgcttgtattgcttatgcagtggaaaaaggcgtaacgaatttacgcgtgatttgccacgatgcaacggaaattttacgagacagtgttgctgatggtgcgcttggcggtttgcagttatttttccccgatccttggcataaagcaaaacatcataaacgtcgtattgttcaaccgcactttgtgacacaagttatacaaaaattaggtgaaaatggttttatccatatggcgacagactgggaaaattatgcagagcaaatgctagaagtattaagcgcaaacaccaatttagtgaacacttcgaaaaatggcgattatattccaagaccagattttagacctttaactaaatttgaagccagaggttacaaacttggacatggtgtttgggatttatattttgtgaagaaataa

SEQ ID NO: 668 - protein, 246 aa, Haemophilus influenzae
MTQTFADQKRKTVETAEFTEDGRYKRKVRSFVLRTGRLSEFQRNMMNDNWGTLGLDYQTEPFDFAKIYGNDNPVVLEIGFGMGKSLVDMAFANPDKNYLGIEVHTPGVGACIAYAVEKGVTNLRVICHDATEILRDSVADGALGGLQLFFPDPWHKAKHHKRRIVQPHFVTQVIQKLGENGFIHMATDWENYAEQMLEVLSANTNLVNTSKNGDYIPRPDFRPLTKFEARGYKLGHGVWDLYFVKK

SEQ ID NO: 669 - DNA, 345 bp, Haemophilus influenzae
atgtctaaatcttacaatcaacgccaacgcaaaaaacttcatctcgcggaatttcaagaactgggttttcttgtaaatttccaatttgtagaaggtactgcgattgaaactgtagatgaaaccgttgatcgttttattaacgaagtgattcaaccaaatggattagcttatgaaggtagcgggtatttacattgggaaggtttagtttgcctagaaaaaattggcaaatgcgatgaaagccaccgtgaaactgtgaaaaaatggttagaaacaaatggtttgcaacaaattgaagtaagcgaattatttgatatttggtgggaatatccagcaaaagctgaataa

SEQ ID NO: 670 - protein, 114 aa, Haemophilus influenzae
MSKSYNQRQRKKLHLAEFQELGFLVNFQFVEGTAIETVDETVDRFINEVIQPNGLAYEGSGYLHWEGLVCLEKIGKCDESHRETVKKWLETNGLQQIEVSELFDIWWEYPAKAE

SEQ ID NO: 671 - DNA, 531 bp, Haemophilus influenzae
atgaccgttgaaaatttacctcgcagacaatttttacgcggtaaattttcaaccttgagctgtttagaaaataatcaaaaacagaattttgtgggtattagaccgccttggtctgtggaaaattctatttttgtagcacaatgtacgcgctgtggcgactgtctttctgtctgtgaaaccaatattttggtaaagggcgatgctggttttcctgaagtgcgttttgataatggcgaatgtactttttgtgggaaatgtgtagatgcctgtaaacagcctattttttatccgcgtgaccagttaccttggtcacataaaatcgacattggcgtagcttgtttaacattgcaccgtattgaatgccgaacttgccaagataattgtccagctaatgcgattcgtttcaaattacaaatgggtggcgtagcacaacctttagttaatttcgatgcttgtaatggctgtggggcttgtgtacaaggctgtcctgtgaatgcaataacaatgaacgatctaaaacaaaatgaataa

SEQ ID NO: 672 - protein, 176 aa, Haemophilus influenzae
MTVENLPRRQFLRGKFSTLSCLENNQKQNFVGIRPPWSVENSIFVAQCTRCGDCLSVCETNILVKGDAGFPEVRFDNGECTFCGKCVDACKQPIFYPRDQLPWSHKIDIGVACLTLHRIECRTCQDNCPANAIRFKLQMGGVAQPLVNFDACNGCGACVQGCPVNAITMNDLKQNE

SEQ ID NO: 673 - DNA, 282 bp, Haemophilus influenzae
atgaataatacaaatttaatatcagaaaatgcgagagattggcacgttgttggattgatcgtgcaaggtaatccaaaaaaattatcagcaattcaaaccgcacttttagcgattgagcatactgaaattccgacttttgatgaaaaacttggaaaatttgtggtggtaatgcaatcgaacgatcagcatctcttgcttgaaaaaatggaaagtgtgaaagatatcgacggtgtgattaatgtatcgttggtgtatcacgagcaagatgaacaaaataaatag

SEQ ID NO: 674 - protein, 93 aa, Haemophilus influenzae
MNNTNLISENARDWHVVGLIVQGNPKKLSAIQTALLAIEHTEIPTFDEKLGKFVVVMQSNDQHLLLEKMESVKDIDGVINVSLVYHEQDEQNK

SEQ ID NO: 675 - DNA, 2484 bp, Haemophilus influenzae
atgaatttaagtcgtcgagactttatgaaagccaatgcggctatggcagccgcaacggcagcggggctaaccatcccagtcaaaaatgtggttgcgactgaatccgaaattaaatgggacaaagcagtatgtcgtttctgtggtaccggttgtgcagtattagttggtactaaagatggacgtgttgtggcatctcaaggcgatcctgatgcagaagtaaatcgtggtttaaactgcattaaaggttatttcttgccaaaaattatgtacggtaaagaccgtttaacgcagccgcttttacgtatgacaaacggaaaatttgataagaacggcgattttgcgccagtttcttgggattttgcgttcaaaacaatggctgaaaaattcaaagaagcgttcaaaaagaacggtcaaaatgcagtaggtatgtttagttctggtcagtctaccatttgggaaggctatgcgaagaacaaactttggaaagcaggttttcgttctaacaacgtagacccgaatgcgcgtcactgtatggcatctgcagcagttgcatttatgcgtacttttggtatggatgaaccaatgggttgttataacgacattgaacatgcagatgcttttgttctttggggctcaaatatggcggaaatgcacccaattttgtggtcgcgtattactgatcgccgtatttctaatcctgatgttcgtgtcactgtactttctacttacgaacatcgtagttttgaacttgccgatcacggtttgatatttacaccgcaaactgatttggcaattatgaactacatcatcaattatcttattcaaaataatgcgattaattgggattttgttaataaacataccaaatttaaacgcggagaaacgaatattggctatggtttacgtccagagcatccattagaaaaagacacgaatcgtaaaacagctgggaaaatgcacgattcttcttttgaagaattaaagcaacttgtatcagaatatacagtggaaaaagtatcaaaaatgtctgggttagataaagtccagttagaaactttagcgaaactttatgctgatccaacgaagaaagtggtttcctactggacaatgggctttaaccaacatacacgtggtgtgtgggtaaaccaattaatctacaatattcatttacttactggaaaaatttcaatcccaggttgtggaccattttcattaactggtcaaccttctgcttgtggtacggcgcgtgaagtaggttcattccctcatcgtttacctgccgacttagtggtaactaatccgaaacaccgtgaaattgctgaacgtatttggaaattaccaaaggggacggtttctgaaaaagtggggttacacacaattgcacaagaccgtgcaatgaatgatggagaaatgaatgtgttatggcaaatgtgtaacaataatatgcaagcagggccaaacattaatcaagatcgtttgccaggctggcgtaaagaaggcaacttcgtgattgtttcagatccttacccaactgtatccgcactttctgctgacttaattcttccaacggcaatgtgggtggaaaaagaaggggcttacggcaatgcagaacgtcgtacccaattctggcgtcagcaagtcaaagcaccgggcgaagcaaaatcagacttatggcaattaatggagttcgcaaaatacttcacgacggatgaaatgtggacagaagacttacttgcacaaatgcctgaatatagaggtaaaactttatatgaagtgcttttcaaaaatggtcaagtagataaattcccattgagcgaacttgctgaaggccaattaaacgatgaatcagaatattttggttactacgttcacaaaggtttatttgaagaatacgctgaatttggtcgcggtcacggtcacgatttagctccatttgatatgtatcataaagcgcgtggtttacgttggccagttgtggagggtaaagaaaccttatggcgttaccgtgaaggctatgatccgtatgttaaagaaggggaaggcgtggctttctacggttatcctgataagaaagcgattattcttgcggtgccttatgaaccaccagctgagtcacccgataatgaatacgatttatggttatcaacaggtcgtgttcttgaacattggcatacggggacaatgacacgccgtgtaccagaattgcatcgagcatttccaaataatttagtatggatgcacccattagatgcacaagcacgtggtttacgtcatggcgataaaattaagatttcatctcgtcgaggcgaaatgatttcttatttagatactcgcggacgtaataaaccacctcgtggcttagtatttaccactttctttgatgcaggtcagcttgcaaatagcttaacactagatgcgacagacccaatttcaaaagaaaccgacttcaaaaaatgtgcggtaaaagtggaaaaggctgcgtaa

SEQ ID NO: 676 - protein, 827 aa, Haemophilus influenzae
MNLSRRDFMKANAAMAAATAAGLTIPVKNVVATESEIKWDKAVCRFCGTGCAVLVGTKDGRVVASQGDPDAEVNRGLNCIKGYFLPKIMYGKDRLTQPLLRMTNGKFDKNGDFAPVSWDFAFKTMAEKFKEAFKKNGQNAVGMFSSGQSTIWEGYAKNKLWKAGFRSNNVDPNARHCMASAAVAFMRTFGMDEPMGCYNDIEHADAFVLWGSNMAEMHPILWSRITDRRISNPDVRVTVLSTYEHRSFELADHGLIFTPQTDLAIMNYIINYLIQNNAINWDFVNKHTKFKRGETNIGYGLRPEHPLEKDTNRKTAGKMHDSSFEELKQLVSEYTVEKVSKMSGLDKVQLETLAKLYADPTKKVVSYWTMGFNQHTRGVWVNQLIYNIHLLTGKISIPGCGPFSLTGQPSACGTAREVGSFPHRLPADLVVTNPKHREIAERIWKLPKGTVSEKVGLHTIAQDRAMNDGEMNVLWQMCNNNMQAGPNINQDRLPGWRKEGNFVIVSDPYPTVSALSADLILPTAMWVEKEGAYGNAERRTQFWRQQVKAPGEAKSDLWQLMEFAKYFTTDEMWTEDLLAQMPEYRGKTLYEVLFKNGQVDKFPLSELAEGQLNDESEYFGYYVHKGLFEEYAEFGRGHGHDLAPFDMYHKARGLRWPVVEGKETLWRYREGYDPYVKEGEGVAFYGYPDKKAIILAVPYEPPAESPDNEYDLWLSTGRVLEHWHTGTMTRRVPELHRAFPNNLVWMHPLDAQARGLRHGDKIKISSRRGEMISYLDTRGRNKPPRGLVFTTFFDAGQLANSLTLDATDPISKETDFKKCAVKVEKAA

SEQ ID NO: 677 - DNA, 810 bp, Haemophilus influenzae
atgaagaaacccgcacttaatcctgaacgtagaaaatttcttaaagaagcaacccgtactgcgggtggtttagctggcgttgggattttgttgggattgcagcaaaatcaaagtcttgcacgcgaaggtgtgccattacgccctccatttgctttgcaagatgcgaaagcgttttctgccgcttgtattcgttgcggacaatgtgttcaagcctgtccttatgacatgctgcatttagcctctttattatcgccagtagaagcgggaacgccgtattttattgcgcgtgataaaccttgtgaaatgtgtcctgatattccttgcgcaaaagcctgtcctagtggtgcattagatcgtcaagcaacagatattaatgaatcgcgtatggggctgtcagtactgttagatcacgaaacttgcttaaattatcaaggattacgttgtgatgtttgttatcgagtttgtccattaatcgataaagcgattacattggaaacacaacataatccacgttctgataagcatgccttatttattccaacagtacattctgatgcctgcacgggatgtggaaaatgtgagcaagcttgtgtgttagaagaggctgcgattaagattttaccaatggatctggcaaaaggtatgttaggtaagcattatcgtttaggttgggaagaaaaagcgaaagctggccattctcttgcacctaaagatatgatttcgttgccaactcgaacaccagaaggaacaactgtaattcctgaaccagcagaacccgtgcttgcgcctattttagggagtggcaaataa

SEQ ID NO: 678 - protein, 269 aa, Haemophilus influenzae
MKKPALNPERRKFLKEATRTAGGLAGVGILLGLQQNQSLAREGVPLRPPFALQDAKAFSAACIRCGQCVQACPYDMLHLASLLSPVEAGTPYFIARDKPCEMCPDIPCAKACPSGALDRQATDINESRMGLSVLLDHETCLNYQGLRCDVCYRVCPLIDKAITLETQHNPRSDKHALFIPTVHSDACTGCGKCEQACVLEEAAIKILPMDLAKGMLGKHYRLGWEEKAKAGHSLAPKDMISLPTRTPEGTTVIPEPAEPVLAPILGSGK

SEQ ID NO: 679 - DNA, 864 bp, Haemophilus influenzae
atggcaaatgcaccaaaatttgcagggaaagaggctcgagaaaaatggggctggtggtatgcaaaccgctttttgttttggcgtcgattaagccaacttagcattcttgcgatgtttttgagtggcccttattttggcgtgtggattttaaaaggtaattatagtggtagtttattactcgatactattccactaagtgatcctctaattaccgctgaaagcttggctgcaagacatttaccagatgctctcactttaattggtgctgcaattattgtgttattttacgcagtacttggtagtaaagtattttgtggttgggtatgcccactaaatgttgtgactgactgtgctgcgtggcttcgccgtaagttaggcattcgccaaacagcaaaaatttcgcgcggtttacgttatggtattcttgtgcttattttactaggcagtagtgtcagcggaatgttgctttgggaatgggttaatccagtggctgctcttggtcgcgcctttgtatttggttttggtgcaacaggctggttattacttgttatttttctttttgatttattgattgctgaacacggctggtgtggacatctttgcccaattggtgctgcttatggtgtgattggtgcaaaaagtttaatccgtattaaagtgattgatcgcgctaaatgcgataattgtatggattgttacaatgtttgtcccgaagcccaagtgttacgttcgcctttacacggaaaaaaagacgaaagcctactagtgctttccaaagattgcatcagctgcggacgttgtattgacgtttgcgctgaaaaagtttttaaattttcgaccagattcgatcattcaggggagtga

SEQ ID NO: 680 - protein, 287 aa, Haemophilus influenzae
MANAPKFAGKEAREKWGWWYANRFLFWRRLSQLSILAMFLSGPYFGVWILKGNYSGSLLLDTIPLSDPLITAESLAARHLPDALTLIGAAIIVLFYAVLGSKVFCGWVCPLNVVTDCAAWLRRKLGIRQTAKISRGLRYGILVLILLGSSVSGMLLWEWVNPVAALGRAFVFGFGATGWLLLVIFLFDLLIAEHGWCGHLCPIGAAYGVIGAKSLIRIKVIDRAKCDNCMDCYNVCPEAQVLRSPLHGKKDESLLVLSKDCISCGRCIDVCAEKVFKFSTRFDHSGE

SEQ ID NO: 681 - DNA, 444 bp, Haemophilus influenzae
atgactaaacaggtatctaaaattttagcgggattatttaccgcactttttgctggctcactgatggcatctgatgcaccagcagtgggaaaagatttaactcaagcggcagaaaatattccacccgcatttcataatgcaccgcgtcaaggcgaattacccgcattgaactatgtaaatcagcctccaatggttccacatagtgtggcaaactatcaagtgacaaaaaatgtaaatcaatgtttaaattgccacagcccagaaaattctcgtttgagcggtgcaactcgaatcagcccaactcactttatggatcgtgatggaaaagtaggttcaagttcatcgccacgtcgttatttctgtttacaatgtcacgtttctcaagcaaacgtagatccgattgttccaaatgatttcaaaccgatgaaaggttacggaaactaa

SEQ ID NO: 682 - protein, 147 aa, Haemophilus influenzae
MTKQVSKILAGLFTALFAGSLMASDAPAVGKDLTQAAENIPPAFHNAPRQGELPALNYVNQPPMVPHSVANYQVTKNVNQCLNCHSPENSRLSGATRISPTHFMDRDGKVGSSSSPRRYFCLQCHVSQANVDPIVPNDFKPMKGYGN

SEQ ID NO: 683 - DNA, 603 bp, Haemophilus influenzae
atgtctgagaaaaaaccaaatatcttaaagcgtttctggcaatggtttagaaaaccaagccgtatggcgataggtacaattattatcttatcggctattggcggtattctttcttgggttggttttaactatggtttagaaaaaaccaacaccgaacagttctgtgcaagctgccatatgcaagatgcttatccagaatatttacatagcgtgcattatcaaactcgtactggtgtgggggcaagttgtccagattgtcacgtaccacacgaatttggtgcaaaaatgaaacgtaaaattattgcagctaaagaagtatatgcgcactatactggaaaagtggataccttagaaaaattcaatgcgcatcgtttagaaatggctcaaaatgaatgggcgcgtatgaaagctaacgattctaaagaatgtcgtaattgtcataatgtagatcgtatgaacttcaatgatcaacgttctgtggcggcacgtatgcaccaaaaaatgaaaactgaaggtaaaacttgtatcgactgtcacaaaggtattgcacaccaattacctgatatgagtggcgttgagtcaggcttcaaagacgagaagtga

SEQ ID NO: 684 - protein, 200 aa, Haemophilus influenzae
MSEKKPNILKRFWQWFRKPSRMAIGTIIILSAIGGILSWVGFNYGLEKTNTEQFCASCHMQDAYPEYLHSVHYQTRTGVGASCPDCHVPHEFGAKMKRKIIAAKEVYAHYTGKVDTLEKFNAHRLEMAQNEWARMKANDSKECRNCHNVDRMNFNDQRSVAARMHQKMKTEGKTCIDCHKGIAHQLPDMSGVESGFKDEK

SEQ ID NO: 685 - DNA, 645 bp, Haemophilus influenzae
atgaaaattattcttttaggtgcaccgggtgcaggtaaaggcactcaagcacaatttattatgaacaaatttggtatcccgcaaatttcaactggtgatatgttccgtgctgcaatcaaagcggggactgaacttggcaaacaagctaaagcattaatggatgaaggtaaattagtaccagatgaattaaccgttgctcttgtaaaagatcgtattgctcaagctgactgtgcaaatggtttcttgttagatggtttccctcgtactattccacaagcggatgcactgaaagattcaggtgttaaaattgactttgttttagaatttgatgtgccagacgaagtgattgttgaacgtatgagtggccgtcgcgtacaccaagcgtctggtcgttcttaccacatcgtttataatccaccaaaagtggaaggtaaagatgatgtaacaggcgaagatttaattattcgtgcagacgataaaccagaaactgtattagatcgtttagccgtatatcataaacaaactagcccattaattgattattaccaagcagaagcgaaagcggggaatactcaatatttccgtttagacggtacacaaaaagtagaagaagttagccaagagttagataaaatcttaggctaa

SEQ ID NO: 686 - protein, 214 aa, Haemophilus influenzae
MKIILLGAPGAGKGTQAQFIMNKFGIPQISTGDMFRAAIKAGTELGKQAKALMDEGKLVPDELTVALVKDRIAQADCANGFLLDGFPRTIPQADALKDSGVKIDFVLEFDVPDEVIVERMSGRRVHQASGRSYHIVYNPPKVEGKDDVTGEDLIIRADDKPETVLDRLAVYHKQTSPLIDYYQAEAKAGNTQYFRLDGTQKVEEVSQELDKILG

SEQ ID NO: 687 - DNA, 1278 bp, Haemophilus influenzae
atgtcaaattccttttcttcccaaatttttacgcgcaagatgttaatttgcgccttcacaggttttaattctggtttgccattatttgtgttattgcaaatgttgcctgtttggctgacagataaacatctttcaattgagcttattggcgcagtaacgggtgtgatgttgccttatggcttgaaatttttgtgggcaccattattggatcgttatttcccgagttttttagggcgtcgtcgtagctggatgctgctttcacaagtggcattattgattttactttacatcattagcctgtttgatccgctcacacaactgggtacagtagcaaatattgcgttgcttatcgcctttttttcagctacacaagatatcgtgttggatgcgtatcgtcgtgaaattttgagtgatcatgaattaggtttaggaaacactattcatattaatgcttatcgaattgcgggattaattcctggtggattatcgctatatttggcggcgatttatccttgggaaaccgtctttttgtggaccgcactttgtatgttagcaggcatcttcatgacactatttttagcaaaagagccaaaaatagacatgcagcaaactaatcagccgttctatcaagcattttggattccattacaagaatttttccagcgtaagggcgtcattcaggctatcggttttttactatttttgtttttgtataagttcggggattcttttgccacaacgttacaaaccaaatttatttatgacatgggatttagcaaagaggatattgctattgttgtaaaaagtacttcactttggtcaagcattttatctgggcttgctggtggtatgataatgctaaaactgggtattaaccgtgcattgtggctatttgggcttgtacaaatggtaacaattggtgggtttatttggttgtctgctttcggtcattttgatgttattacatctgccgagttatggaaactaggtgttgtgattgcagcagaatatatcggcgttggacttggtaccgcagcttttgtggcttttatggcgcgtgagagtaatcctctttatactgcaacacagcttgcactttttacaagcctttcagctttgccaagtaaagttttaggtatactttctggttatgttgtgggagcagtggggtattatcagtatttttggttttgtttatttttagcgattcccggcatgctttgtttattttgggtagcaccttggaagcaaaaaaataataagaccagctcagtataa

SEQ ID NO: 688 - protein, 425 aa, Haemophilus influenzae
MSNSFSSQIFTRKMLICAFTGFNSGLPLFVLLQMLPVWLTDKHLSIELIGAVTGVMLPYGLKFLWAPLLDRYFPSFLGRRRSWMLLSQVALLILLYIISLFDPLTQLGTVANIALLIAFFSATQDIVLDAYRREILSDHELGLGNTIHINAYRIAGLIPGGLSLYLAAIYPWETVFLWTALCMLAGIFMTLFLAKEPKIDMQQTNQPFYQAFWIPLQEFFQRKGVIQAIGFLLFLFLYKFGDSFATTLQTKFIYDMGFSKEDIAIVVKSTSLWSSILSGLAGGMIMLKLGINRALWLFGLVQMVTIGGFIWLSAFGHFDVITSAELWKLGVVIAAEYIGVGLGTAAFVAFMARESNPLYTATQLALFTSLSALPSKVLGILSGYVVGAVGYYQYFWFCLFLAIPGMLCLFWVAPWKQKNNKTSSV

SEQ ID NO: 689 - DNA, 1017 bp, Haemophilus influenzae
atggccattttagtgacgggtggcgctggttatatcggttctcacacagttgtagaattattaaatgttggcaaagaggtggtagtattagataatctttgcaattcatcgccaaaatcccttgagcgtgtaaaacaaattacaggcaaagaagcaaagttttatgaaggcgatattttagatcgtgctttgttacaaaaaatttttgcagaaaatgagattaactcggttattcactttgcagggttaaaagccgtaggggaaagtgttcaaaagccgacagaatattacatgaacaatgtcgctggcacccttgtattaattcaagaaatgaaaaaagcgggtgtttggaactttgtattcagctcatctgcaacggtttacggcgatccaaaaattattccaattacagaggattgtgaagtcggcggtacaaccaacccttatggtacatctaaatatatggttgagcagattttacgcgatacagcaaaagcggaaccaaaatttagcatgactatcttgcgttattttaatccagttggggcgcatgaaagtggcttgattggtgaagatccaaatggtattccaaataatttattaccttatattagccaagttgctatcggtaaattagcacaactttctgtatttggtagtgattacgacactcatgatggaacaggtgtgcgtgattatattcatgtagtggatttagctgtggggcatttaaaagcgcttcaacgtcatgaaaatgacgctggcttacatatttataatcttggtacgggccatggttattccgtattagatatggtaaaagcctttgaaaaagccaacaatattacaattccatataaacttgtagaacgccgctctggcgatattgccacttgctattctgatcctagtttagctgcaaaagagcttggttgggtggcagaacgtggtcttgaaaaaatgatgcaagacacgtggaactggcagaaaaataattcaaaagggtatagagattaa

SEQ ID NO: 690 - protein, 338 aa, Haemophilus influenzae
MAILVTGGAGYIGSHTVVELLNVGKEVVVLDNLCNSSPKSLERVKQITGKEAKFYEGDILDRALLQKIFAENEINSVIHFAGLKAVGESVQKPTEYYMNNVAGTLVLIQEMKKAGVWNFVFSSSATVYGDPKIIPITEDCEVGGTTNPYGTSKYMVEQILRDTAKAEPKFSMTILRYFNPVGAHESGLIGEDPNGIPNNLLPYISQVAIGKLAQLSVFGSDYDTHDGTGVRDYIHVVDLAVGHLKALQRHENDAGLHIYNLGTGHGYSVLDMVKAFEKANNITIPYKLVERRSGDIATCYSDPSLAAKELGWVAERGLEKMMQDTWNWQKNNSKGYRD

SEQ ID NO: 691 - DNA, 477 bp, Haemophilus influenzae
atgtgtgcagtggcaactgtaatgggttataaagatctttatttaacaggtattgatttttatcaagaaaaagggaatccttacgcatttcatcatcaaaaagaaaatattattaaattattaccttctttttcacaaaataaaagtcaaagcgatatccattctatggaatatgatttaaatgcactttattttttacaaaaacattatggagtaaatatttattgcatttcgccagaaagtcctctatgtaattattttcctttatcaccactgaataacccaattacttttattctcgaagaaaagaaaaattacacacaagatattttaattccgccgaagtttgtatataaaaaaattggtatatattccaaaccaagaatttaccaaaatctgatttttcggttgatctgggatatattacgtttacctaatgatataaaacacgccttaaaatcaagaaaatgggattag

SEQ ID NO: 692 - protein, 158 aa, Haemophilus influenzae
MCAVATVMGYKDLYLTGIDFYQEKGNPYAFHHQKENIIKLLPSFSQNKSQSDIHSMEYDLNALYFLQKHYGVNIYCISPESPLCNYFPLSPLNNPITFILEEKKNYTQDILIPPKFVYKKIGIYSKPRIYQNLIFRLIWDILRLPNDIKHALKSRKWD

SEQ ID NO: 693 - DNA, 723 bp, Haemophilus influenzae
atggtgcgtattcaagatttgagtcttgcctttaatgggcaaacgttatttgagcatcttaatttaaccctgttgccgaacgaatgggtaagcttgttgggcagttcaggcgtgggaaaatcgacacttttgcgactactggcggacattgaaacgcaaggtgtggtgcaggggaaaatcctatttgaaccgaaaattcgtattgcgtggttgcctcaaaaagagacactttatccgtggttgtcaattgtcgataacgtgcagttgcaagcggtcttatttgggcgaaaatctgcaaaaaccactgaaaaagctaaaatgttgcttgaaaaagtgggaatggcagcacattggcacaagccttgttcgcagctttcgggcgggcaaaaacagcgggttgccttggcacgcaccttaatgcaagaggcggatttgattttgcttgatgagcctttttccgctcttgatgccatcagtcgccatcaacttcaagatttagcctttgaactgctagaagataaatcagtgctgctcgtgacccacgatccgcaagaggcattacggctaagtcagcgtatttttgtgttgcgttcgcctgaatctcatcaaacagcattatcggcggtgattctgcccgaaggtaacgcccctcgtgagttgcatcaagccaatttatgggcgttgcagcaacaattattgcaggaattagggggcgaacaatga

SEQ ID NO: 694 - protein, 240 aa, Haemophilus influenzae
MVRIQDLSLAFNGQTLFEHLNLTLLPNEWVSLLGSSGVGKSTLLRLLADIETQGVVQGKILFEPKIRIAWLPQKETLYPWLSIVDNVQLQAVLFGRKSAKTTEKAKMLLEKVGMAAHWHKPCSQLSGGQKQRVALARTLMQEADLILLDEPFSALDAISRHQLQDLAFELLEDKSVLLVTHDPQEALRLSQRIFVLRSPESHQTALSAVILPEGNAPRELHQANLWALQQQLLQELGGEQ

SEQ ID NO: 695 - DNA, 738 bp, Haemophilus influenzae
atgaaaattcgcctacttaaaccgcttttaattgttggcgtgttgttgatgatctggcaaatggtcgcaaccttgggcagcttcccacactacatttttccctcaccgcaagctgtaaggcagcagttattcacacacgctgaactgctttggcagcatacgcaagtcacgttgttagaaatctgcttagggctgttgttaggctttctatttgggttgatttcggcattgttgctctcattttctcgtcaaatttctgccgtcttattgccgattttggtcatttcgcaagcgattcccgtgtttgctattgcgccgttgttggtgttgtggtttggctatggaatggcatccaaaattgtgatgtcggtgctgattatctacttccccgtcacggcagcttgttatgatggactacgcaacaccccacaagcgtggctcgatttggcgaaaacctttaacatttcccccttgcgtttattgcttaaagtacgattacctgcggctttgcctgcttttgcttcgggcttgcgaattgcggtttcggtcgccccgattggtgcggtggtgggcgaatgggtaggttcgtctgaaggcttggggtatttgatgattcacgccaatgcccgaatgcaagtcgatttaatgtttgccgccttactgattttagtgtcaatttcactctgtttatatttcagcattgattggctattacaccgttttatttggtctgtttaa

SEQ ID NO: 696 - protein, 245 aa, Haemophilus influenzae
MKIRLLKPLLIVGVLLMIWQMVATLGSFPHYIFPSPQAVRQQLFTHAELLWQHTQVTLLEICLGLLLGFLFGLISALLLSFSRQISAVLLPILVISQAIPVFAIAPLLVLWFGYGMASKIVMSVLIIYFPVTAACYDGLRNTPQAWLDLAKTFNISPLRLLLKVRLPAALPAFASGLRIAVSVAPIGAVVGEWVGSSEGLGYLMIHANARMQVDLMFAALLILVSISLCLYFSIDWLLHRFIWSV

SEQ ID NO: 697 - DNA, 945 bp, Haemophilus influenzae
atgaagacaatcatccgttattttagctttgtaatggggctaatgctcacgcttcctagctttgcaaaagagaaaatcagcgtaatgctagattggtatgtaaaccccgatcatgcagccatcattgtggctcaacaaaaaggcttttttgaaaaaaataacttggaggttgaaattaccgaacctgctgatcctgcattaccgccgaaattagcggcggcagaaaaagttgatttagccgtgagttatcagcctcagctttatcaacaagtggcagaaggcttgcctttagtgcgagtgggttcactgatttcaaatccattaaatagcgtagtggtactaaaaaagagcaatttgaaaagccttgctgatttaaaaggtaaaaaagtggggtattctgtcagcggttttgaagatggattacttaatacaatgcttcattctattggtttaagcaataaagatgtggaattagtgaatgtaaattggtcgctttcgccctcccttttaactggacaagtggatgctgtgattggtgcatttcgtaattttgaactcaatcagcttgctttagaaaatcaagaaggtatcgcattcttccctgaacaatatggcgtgcctgcttatgatgagttgattttagttgctaataaaaacagcgtaacagataaaaaaacatcggcatttttgaccgcacttgaacaagccacaagctatctacaagctcaccctaatgaagcgtggcaagcctttgtcagctataaaccgaatgaactcaacacgccattaaaccaactggcgtggaaagacactctccctttcttagccaataaacctcgccaattagacgctaaacgttatcaacaaatggcagaatttatgcaacaaaaaggcttaattccaaaagccttagcgttgaaagaatatgcggtagaaattgaataa

SEQ ID NO: 698 - protein, 314 aa, Haemophilus influenzae
MKTIIRYFSFVMGLMLTLPSFAKEKISVMLDWYVNPDHAAIIVAQQKGFFEKNNLEVEITEPADPALPPKLAAAEKVDLAVSYQPQLYQQVAEGLPLVRVGSLISNPLNSVVVLKKSNLKSLADLKGKKVGYSVSGFEDGLLNTMLHSIGLSNKDVELVNVNWSLSPSLLTGQVDAVIGAFRNFELNQLALENQEGIAFFPEQYGVPAYDELILVANKNSVTDKKTSAFLTALEQATSYLQAHPNEAWQAFVSYKPNELNTPLNQLAWKDTLPFLANKPRQLDAKRYQQMAEFMQQKGLIPKALALKEYAVEIE

SEQ ID NO: 699 - DNA, 648 bp, Haemophilus influenzae
atgattgaacaactcattcaacaagctcagccttattggcaacaatatattgaacacgaatttgtgcaacagctcgcaaaaggtacgctaccaaaagcttgttttcagcattatttaaagcaggattatctctatctttttcattacagccgagcctttgccttaggtgtattcaaggcaaaaaatttcgctgaaatggaaacacctcgtaaaaccttagagattctttgccaagaaattcaactacatttaaattattgccgtgagtggggaattagtgagcaagagatttttgctactcaagaaagtgccgcttgcattgcttatactcgctatttgcttgattgcggcatgacgggcagtttggctgagctttatgcagctgtaaccccttgtgctttgggttacgctcaagttgctcgttacattactcagcattatcctcgcttaccgaacaatccttatcaaacgtggattgatacctatgcgagtgaggaatttcaacaagccgcccaagaaaccgttgattttcttaccgcactttgcaaaccactaaacccaagccagcttgctgagattcaacagattttcaccaccgcaactagaatggaaattgcgttttggcaaatggggttggattttgcttag

SEQ ID NO: 700 - protein, 215 aa, Haemophilus influenzae
MIEQLIQQAQPYWQQYIEHEFVQQLAKGTLPKACFQHYLKQDYLYLFHYSRAFALGVFKAKNFAEMETPRKTLEILCQEIQLHLNYCREWGISEQEIFATQESAACIAYTRYLLDCGMTGSLAELYAAVTPCALGYAQVARYITQHYPRLPNNPYQTWIDTYASEEFQQAAQETVDFLTALCKPLNPSQLAEIQQIFTTATRMEIAFWQMGLDFA

SEQ ID NO: 701 - DNA, 816 bp, Haemophilus influenzae
atgtttgattggcttttagaaccgctacaatttgagtttatgcaaaatgccttattgaccgcattgattgtttcaattatttgtgcgttgctttcttgttatttagtcttgaaaggttggtcattaatgggtgatgcgatttctcacgctgtattacctggtattgtacttgcttatttggcaggaatccctttagcgattggcgcatttttttcaggcattttttgctcgcttggtgtgggatatttaaaagaaaatagtcgtataaaagaagataccgcaatgggcattgtattttctggaatgtttgctatcggtttggttatgtttaccaaaattcaaacagaacagcatttaagccatattttgtttggtaatgtgttgggtgtaagtcatcaagagctgattcaaagtgcggtcatttctgcaataattttttgtctgattgtctttaaacgtaaagactttttgctttattgttttgacccaaaccacgcccgtgttgcagggctttctcctaaaattttacattatggtttgttaatgctgcttgctttaactattgtaagcacgatgcaagtggttggcgttattttggtggtggcaatgttaattgcaccaggaattactgcacttacgctaacaaaatcttttgataaaatgctatggattgctattgtcagttccattacatcaagcctaattggcgtaatcttgagctatcattttgatgcctcaacaggtgcttgtattattcttctgcaagccgcattttttgttatagcattagcttatagcaagattagaataagataa

SEQ ID NO: 702 - protein, 271 aa, Haemophilus influenzae
MFDWLLEPLQFEFMQNALLTALIVSIICALLSCYLVLKGWSLMGDAISHAVLPGIVLAYLAGIPLAIGAFFSGIFCSLGVGYLKENSRIKEDTAMGIVFSGMFAIGLVMFTKIQTEQHLSHILFGNVLGVSHQELIQSAVISAIIFCLIVFKRKDFLLYCFDPNHARVAGLSPKILHYGLLMLLALTIVSTMQVVGVILVVAMLIAPGITALTLTKSFDKMLWIAIVSSITSSLIGVILSYHFDASTGACIILLQAAFFVIALAYSKIRIR

SEQ ID NO: 703 - DNA, 849 bp, Haemophilus influenzae
atgttagatttattgcttgaacctttttcctatgattatatgctcaaggcgatgattttgagtaccgcagtgggtggcatttgtgcttttttgtcttcatatttaatgcttaaaggctggtctctaattggtgatgcactttcccattctgtcgtacccggtgttgcaattgcctatgcttttgcgttgccttatgcacttggcgcattttttgccggaattttagccgcactttccattctttggattaaatccatttctaaattgaaagaagatgctgttatcggatttattttcagtactttttttgcattaggtctgttaatcatttctttaaatccaacagcagtaaatgtgcaaaatatcattttaggtaatattttaggcattgccgatgaagatatttaccaagtggcaattattatcggtgtttgtttagtattacttttattattttggaaggatttactgctgatttttttcgatgaaactcaagcgattacagtcggtctttccccattattttataaaatcttatttttcacattattaagtgcttgtgtggtagctgccttgcaaactgtaggcgcgattttagtcattgcgatggtcattaccccaggtgcgacagcatatttactaacggataaattcaaaaccttgtcaatcatcgccattattttaggggcggtgacaagttttgttggagtctatattagctattatttagatggtgccacaggcggtgtgattgtgacattgcaaacattattattcttggctgccttcttgttttcaccaaaatatggcttactcactcgtaataaaaaggcggtagaaaatgtttga

SEQ ID NO: 704 - protein, 282 aa, Haemophilus influenzae
MLDLLLEPFSYDYMLKAMILSTAVGGICAFLSSYLMLKGWSLIGDALSHSVVPGVAIAYAFALPYALGAFFAGILAALSILWIKSISKLKEDAVIGFIFSTFFALGLLIISLNPTAVNVQNIILGNILGIADEDIYQVAIIIGVCLVLLLLFWKDLLLIFFDETQAITVGLSPLFYKILFFTLLSACVVAALQTVGAILVIAMVITPGATAYLLTDKFKTLSIIAIILGAVTSFVGVYISYYLDGATGGVIVTLQTLLFLAAFLFSPKYGLLTRNKKAVENV

SEQ ID NO: 705 - DNA, 921 bp, Haemophilus influenzae
atggactctttctcgacatcaatttgggttaatgatgtaactgttcgttacaacaatggtcatactgctattcacaatatgacgttctcactcaatagtggaactatttgtgcgttagttggcgtgaatggaagtggcaagtccacattatttaaaagcataatggggcttgtaaagccacaacaaggcgaaattaaactttgtgatttgccaatttcccaagcactgaaacgtaatttggttgcttatgtgccacaatcagaagaagtggactggcaatttccggtgtcagtgtatgatgtcgtgatgatgggacgttatgggtatatgaattttcttcgtatccccaaagcgattgataaacaaaaagttcaagaggcgatgcagcgagtaaatattgagcatcttgcgcatcgtcaaattggcgagttatctggcgggcagaaaaaacgcgtgtttttggcccgcgctttagcacaacaaagtccaattattttattggatgaacctttcactggcgttgatgtgaaaactgaaaatgccattgttgatcttcttcaacagcttcgagaagaaggtcatctgattcttgtttcaacccataacttaggttctgttcctgatttttgtgatcaagtggtcatgattaatcgcacagtcatcgccgcaggaaaaacagaagacacctttaaccaacataatttggaaattgtatttggtggggtgttgcgtcatattaaattattgggcgaaaatttacataatgatgaagataaacgttctgttaccgtcttaacagatgatgaaaaagccgttgtattctatggcgaaactaagcaagatccacctgcgccaacaacacaaaattgtcattttgaagattgcccttataaaagtgcagttaaaaataagagggattag

SEQ ID NO: 706 - protein, 306 aa, Haemophilus influenzae
MDSFSTSIWVNDVTVRYNNGHTAIHNMTFSLNSGTICALVGVNGSGKSTLFKSIMGLVKPQQGEIKLCDLPISQALKRNLVAYVPQSEEVDWQFPVSVYDVVMMGRYGYMNFLRIPKAIDKQKVQEAMQRVNIEHLAHRQIGELSGGQKKRVFLARALAQQSPIILLDEPFTGVDVKTENAIVDLLQQLREEGHLILVSTHNLGSVPDFCDQVVMINRTVIAAGKTEDTFNQHNLEIVFGGVLRHIKLLGENLHNDEDKRSVTVLTDDEKAVVFYGETKQDPPAPTTQNCHFEDCPYKSAVKNKRD

SEQ ID NO: 707 - DNA, 882 bp, Haemophilus influenzae
atgcgaaattcattcaaaattatgaccgcacttgcacttggtttatttgcaatgcaagctaatgcaaaattcaaagttgttaccaccttcaccgtgattcaagatattgcgcaaaatgtggcaggcaatgcggcaacagtggaatctattaccaaaccaggtgctgaaattcacgaatatgaaccaacgccaaaagacattgtaaaagcacaatctgctgatttaattttatggaacggcttaaatttagaacgttggtttgagcgtttcttccaaaatgttaaagataaacctgctgtggtagtaacagaaggtattcaaccattatctatttatgaaggcccgtataaagatgcgcctaatccacacgcttggatgtcgccatctaatgctttaatttatattgaaaatattaagaatgcgttagtgaaatacgatccacaaaatgcagctgtgtatgaaaaaaatgccgctgactatgctcaaaaaattaaacaacttgatgaaccgcttcgtgcaaaattagcacaaattccagaagcgcaacgctggcttgtaacaagtgaaggtgctttcagttatttggcgaaagattacaacttaaaagaaggttatttatggccaatcaatgctgaacaacaaggcacaccacaacaagtgcgtaaagtgattgatttagttcgtaaaaacaatattccagttgtgtttagtgaaagtacaatttcagccaaacctgcacaacaagtagctaaagaaagtggtgcaaaatacggtggcgtattgtacgttgattcactttctgcgaaaaacggccctgtgccaacttatattgatttgcttaacgtcactgtatcaactattgttaaaggattcggaaaataa

SEQ ID NO: 708 - protein, 293 aa, Haemophilus influenzae
MRNSFKIMTALALGLFAMQANAKFKVVTTFTVIQDIAQNVAGNAATVESITKPGAEIHEYEPTPKDIVKAQSADLILWNGLNLERWFERFFQNVKDKPAVVVTEGIQPLSIYEGPYKDAPNPHAWMSPSNALIYIENIKNALVKYDPQNAAVYEKNAADYAQKIKQLDEPLRAKLAQIPEAQRWLVTSEGAFSYLAKDYNLKEGYLWPINAEQQGTPQQVRKVIDLVRKNNIPVVFSESTISAKPAQQVAKESGAKYGGVLYVDSLSAKNGPVPTYIDLLNVTVSTIVKGFGK

SEQ ID NO: 709 - DNA, 108 bp, Haemophilus influenzae
ttggctgcttgtgatgataaacctaaaatgacagaacaaaccaaaacaactgaccaagaaaaagtcactgtagaacagcctgctcatcagctaaaaaacgcgagataa

SEQ ID NO: 710 - protein, 35 aa, Haemophilus influenzae
MAACDDKPKMTEQTKTTDQEKVTVEQPAHQLKNAR

SEQ ID NO: 711 - DNA, 879 bp, Haemophilus influenzae
atgtttaaaaaagctttatttattttatctttgtgtccttcttttgcactggcacagtcttatgttgtgtatgattttacccataatcgagtgttggaaagccacgcgtctgatagtattcagcctattgcctctgtaacaaaattaatgacggctaatgtatttttagagaataataaaaatcctaattgtcgaatcgcaatcacaaaagaggatacggatcgaattaaaggtactggaacaaaattacctaaaaatattcctatctcttgtaacgaattattgaaagcaatgcttgtccattctgataactatgccgcccacgcgctttctcgtgcagcgggaataagtcgtcgccaatttattaagaaaatgaacgaaaaagcccatcaacttggtatgtattctactcgttttcacgatagttcaggattatctagctataatatttccagcccaatggatttagttaagctcgccaaatattcattaaataaatcggacattaaacgtttatctaatcttagtgcaacttatatccaagcagggaaacacaagctttatattaaaaatactaataagttagtgcgtgatgaaatttttgatgctgtggtaaataaaacaggctacattcaagaatctggttataaccttgttttcatcaataaacacccatgcaaaaatgcaactattggcgtaattagtttaaataacacttcctcagcgtatcgttctagttttactaaaagcaaattagaaaaattcggctgcacggcattaaatggaagaacaattcgtgatgtagcaggagaagcccaatatgaagatggctatgatgaagtgggatttaatacgctaattcagaaattatcaaaataa

SEQ ID NO: 712 - protein, 292 aa, Haemophilus influenzae
MFKKALFILSLCPSFALAQSYVVYDFTHNRVLESHASDSIQPIASVTKLMTANVFLENNKNPNCRIAITKEDTDRIKGTGTKLPKNIPISCNELLKAMLVHSDNYAAHALSRAAGISRRQFIKKMNEKAHQLGMYSTRFHDSSGLSSYNISSPMDLVKLAKYSLNKSDIKRLSNLSATYIQAGKHKLYIKNTNKLVRDEIFDAVVNKTGYIQESGYNLVFINKHPCKNATIGVISLNNTSSAYRSSFTKSKLEKFGCTALNGRTIRDVAGEAQYEDGYDEVGFNTLIQKLSK

SEQ ID NO: 713 - DNA, 93 bp, Haemophilus influenzae
ttggtcaccttagaaaataggctgatattttaccgcactttttccgctgtaattgaaaatatttgcgatctagatcgcaaaaaagtgcggtaa

SEQ ID NO: 714 - protein, 30 aa, Haemophilus influenzae
MVTLENRLIFYRTFSAVIENICDLDRKKVR

SEQ ID NO: 715 - DNA, 1152 bp, Haemophilus influenzae
atgtcagaattattgtcagtgcaatcagatgcacccgctaaaaaaattaatctaatggatttaacgcgccaacaaatgcgcgaattttttaaagaactcggcgaaaaaccatttcgagcagatcagttagttaaatggatttatcattttggcgaagataacttcgacaatatgacaaacattaataaaaaattacgtgaaaaacttaaggcggttgcagaaattaaagccccagaagttgccgttgagcagcgttcagccgatggcacgataaaatgggcaatgcaagtgggggaacaacaagttgaaactgtgtatattcccgaagcagatcgcgcgacgctttgtgtatcttcccaagttggctgtgccttagcttgtaccttctgttcaaccgcacaacaaggctttaaccgcaatttaacggtttcagaaattatcggtcaagtatggcgagcctctaaaattattggcaactttggcgtaactggcgttagacccattacaaatgtggtaatgatgggaatgggcgaacccttattgaatgttgctaatgttgttcctgcaatggaaattatgttagatgattttgcctatggtttatcaaaacgtcgtgtaaccttatcgacttctggtgttgtgccagcattagataatttgagcaaaatgatcgatgtggctttggctatttcattacatgccccaaacgatgaattacgtgatgaaattgtgccaatcaacaaaaaatataatatcaaaacattgattgactcggtaaatcgttatttgacagtatcaaatgcaaatcatggcaaagtgacgattgaatatgtgatgctcgatcatgtaaatgatggcgtagaacacgctcatcaacttgcagaagtattaaaaaatacgccttgtaaaattaatttaattccgtggaatccgttcccagaagcaccttatgcaaaaagctcgaatacgcgcatcgatcgcttccaaaaaaccttaatggaatatgattttaccgtgattatccgtaaaacccgtggagatgacattgatgcagcttgcggacaattagcgggagatgttatcgatcgtactaaacgtacggcaatgaaacgccaatttggacaaaatattggggtgacagaagttaattaa

SEQ ID NO: 716 - protein, 383 aa, Haemophilus influenzae
MSELLSVQSDAPAKKINLMDLTRQQMREFFKELGEKPFRADQLVKWIYHFGEDNFDNMTNINKKLREKLKAVAEIKAPEVAVEQRSADGTIKWAMQVGEQQVETVYIPEADRATLCVSSQVGCALACTFCSTAQQGFNRNLTVSEIIGQVWRASKIIGNFGVTGVRPITNVVMMGMGEPLLNVANVVPAMEIMLDDFAYGLSKRRVTLSTSGVVPALDNLSKMIDVALAISLHAPNDELRDEIVPINKKYNIKTLIDSVNRYLTVSNANHGKVTIEYVMLDHVNDGVEHAHQLAEVLKNTPCKINLIPWNPFPEAPYAKSSNTRIDRFQKTLMEYDFTVIIRKTRGDDIDAACGQLAGDVIDRTKRTAMKRQFGQNIGVTEVN

SEQ ID NO: 717 - DNA, 540 bp, Haemophilus influenzae
atgaaaacaataagtaaacaactaagtgcggttatttttccttttattttttctgcctgcgtttcacaatctgcatctaacttaaatcatcaagctgccgctaaagctcgtgtggaactcgctttgagctatcttcagcaaaataatcctcaactggctaaaatcaatttagacaaagcacttcaacacgataaaaattactatctcgtgcattcagcacttgcacattattatcaacaacaaggggaaatagagaatgcacatcgtgaatatgaaatagccgtaaaccttaatcataaacaaggcgatgtgcataataattttggtacgtttctatgtagtcaaaagaaatttgaacaagcccagcaacaatttgaattagcacttaattcgccgaattattatcatcaagcagatacatttgaaaatattgtgctttgtgcttattccgcgcaaaaaatggatatttatcagcaaactttagaaaaattacgtcaaatcgatggaaaacgtgcggaaaaattcaatagtctaaaataa

SEQ ID NO: 718 - protein, 179 aa, Haemophilus influenzae
MKTISKQLSAVIFPFIFSACVSQSASNLNHQAAAKARVELALSYLQQNNPQLAKINLDKALQHDKNYYLVHSALAHYYQQQGEIENAHREYEIAVNLNHKQGDVHNNFGTFLCSQKKFEQAQQQFELALNSPNYYHQADTFENIVLCAYSAQKMDIYQQTLEKLRQIDGKRAEKFNSLK

SEQ ID NO: 719 - DNA, 924 bp, Haemophilus influenzae
ttgattaaatttatgaatccaactactgagcaagtgctttcccctggtgagatttttcgtcaaacacgcgaatccttaaatctttctcttgaagatgtcgctaaagaaatcacgctacgcccttctatattagagcaacttgaaaataatgaatttattcaaaaatctacccctgcaatctttgtaaaaggttatgtgcgtagctatgcaaagttcttacgtttgccagattctgtgtgggaaaatattgtttttgctgaaacagaaaaaaatgatttagggaaaaatgcacgttcaacccgtgccgttaatcaatattcctctcacaatcgttggatcgggcgtttaaccgcaatagtattcgtgattgtaattggtatgactgggctttggtggtggcaaagttatcaacaaaatactcaagaacgcgatgatttagtgcaaagctatgttgcctctaccgaaaacaatcagcccgccaccgctcttgtgacaacagaagaaactaataaatctgcaccagaaacagcagcaccagtctcacaaccagtagaaataacaaataatcagttaccagaaatagcacaagaaaatagcgtttcacaacccaaaaacgatgaaaaatcagtttcagacattcaaagtgcggtcgaaaatccaagtatttctccaacgttacctatagcaaaaggcgatttagtgattgaaatactaacaaatagcagttggattagtgtaaaagataacgctcgccacgtattagcacaaaaagaatataaacaaggcgaaatattaacctttaatggcaatgaattttcattaattgtaggcgcgccaagcaatgtgcgtatcacttacaaaggcgagaattatcctctgaaagtggatggtcgtgtagcaaaattcaaactttcacaaccttag

SEQ ID NO: 720 - protein, 307 aa, Haemophilus influenzae
MIKFMNPTTEQVLSPGEIFRQTRESLNLSLEDVAKEITLRPSILEQLENNEFIQKSTPAIFVKGYVRSYAKFLRLPDSVWENIVFAETEKNDLGKNARSTRAVNQYSSHNRWIGRLTAIVFVIVIGMTGLWWWQSYQQNTQERDDLVQSYVASTENNQPATALVTTEETNKSAPETAAPVSQPVEITNNQLPEIAQENSVSQPKNDEKSVSDIQSAVENPSISPTLPIAKGDLVIEILTNSSWISVKDNARHVLAQKEYKQGEILTFNGNEFSLIVGAPSNVRITYKGENYPLKVDGRVAKFKLSQP

SEQ ID NO: 721 - DNA, 1107 bp, Haemophilus influenzae
atgtcagcttttcagccaactattaagcgtcgtgaatcgacaaaaatatatgtgggaaatgtaccaattggtggggatgcgcctattgccgtgcaatcaatgacaaatactcgcaccactgatgtggaagcgacagttgctcaaattaaatcattagaacgtgttggtgcagatattattcgtgtatctgttccaacaatggatgctgcggaagcatttaaacaaattaaacaacaagtgaatgtcccgctcgtagcagatattcatttcgactatcgtatcgcattaaaagtcgcagaatatggagtggattgtttacgtatcaatcctggcaacattggtcgtgaagatcgcgtccgtgccgttgttgattgtgcgcgagacaaaaatattccgattcgtattggtgtaaatgcaggctctttagaaaaagatttgcaagaaaaatatggcgaaccaacgccagaagccttgttagaatccgcattgcgtcatgtagaaattctagatcgtcttaacttcgatcagtttaaagtgagcgtaaaagcctccgatgtattcttagcgattgaatcttatcgtttactggctaaagcaattaaacagcctttacatttaggcattacagaagcaggtggtgcacgtgctggtgcagtaaaatctgcagtgggtttaggaatgttattagctgagggcattggcgatacactgcgcatctctttggcggcagatcccatagaggaaatcaaagtcggttttgatattttgaaatctttacggattcgttcaagaggaattaactttattgcttgcccaacctgttctcgccaagaatttgatgtaatcggtacagtaaatgcgctagaacaacgccttgaagatattattacaccaatggatgtatctattatcggttgtgtagtgaatggtcctggcgaggcactcatctccgatctgggcgtaacgggcggtaacaaaaaaagcggttattatcttgacggcgaacgccaaaaagagcgttttgataacgaagatatagtgaaccaattagaagcaaaaattcgtgcgaaagtcgcacgacaagatccaaaaaacagaattatttaa

SEQ ID NO: 722 - protein, 368 aa, Haemophilus influenzae
MSAFQPTIKRRESTKIYVGNVPIGGDAPIAVQSMTNTRTTDVEATVAQIKSLERVGADIIRVSVPTMDAAEAFKQIKQQVNVPLVADIHFDYRIALKVAEYGVDCLRINPGNIGREDRVRAVVDCARDKNIPIRIGVNAGSLEKDLQEKYGEPTPEALLESALRHVEILDRLNFDQFKVSVKASDVFLAIESYRLLAKAIKQPLHLGITEAGGARAGAVKSAVGLGMLLAEGIGDTLRISLAADPIEEIKVGFDILKSLRIRSRGINFIACPTCSRQEFDVIGTVNALEQRLEDIITPMDVSIIGCVVNGPGEALISDLGVTGGNKKSGYYLDGERQKERFDNEDIVNQLEAKIRAKVARQDPKNRII

SEQ ID NO: 723 - DNA, 1242 bp, Haemophilus influenzae
atgaacgattgtgccccaacagaatctccattatggcaatggattgaagcacaagtacgcaatgtattaaatagttatggctattctgaagtgcgtatgccaattgtagaaagtacgccattgtttgcgcgtgcaatcggcgaagtaactgatgttgtctcaaaagaaatgtacaccttttgggataacgatgaacaattaaccttacgccctgaaggcacagcaggttgtgtgcgagcagccattgaacacggttggatctataataatgaacaacgcttatggtatatcgggccaatgttccgtcacgaacgtccacaaaaagggcgttaccgtcaattccatcaagtaggtgttgaggtattcggtattgcgaatccagaaatcgatgccgaattaatcatgcttacctaccgtctatggaaagcattaggtatcgatcaacatgttacacttcaacttaactctattggctctttagaagctcgagcaaattatcgttcagctttagttggattcttagaaaaccatcaagatttaatgagcgatgaagaaaaagagcgtttagtaagaaatccgcttcgtattttggatacaaaaaatccagaattacaaaaagtattagataacgcgccaaaattacttgattatttagatgatgaaagccgtgcgcattttgaacaattatgttcattattagatgcagtgggtattcaatatgaaattaatcctaaactcgttcgtggtttagattattacaacaaaactgtatttgaatgggtaacctccgctcttggtgcacaaggtaccgtgtgtggcggcggtcgttatgacggtttagtggaacaacttggcggacacgcaacgccaagtatcggatttgcgatgggattagagcgtttagtcttgttggtacaagaagttaatccaaatattcctgcgaaaagtgcggtggatatttatgttgtttatcaaggcgaaggcgcaacattagccgcttttgaattagcggaaaaagtacgctcggaattaccgcacttaaataccatgttgcactgctctagcggtaattttaaaaaacaatttaaacgtgcagataaatctggtgcaacattggcattagttatcggcgaaagcgaagtacaaaataaacaagtcgttgttaaacacttacaaggtggcacagatcagcaaaccttagatttagtgaatataatcgactatcttcaaactcaattttaa

SEQ ID NO: 724 - protein, 413 aa, Haemophilus influenzae
MNDCAPTESPLWQWIEAQVRNVLNSYGYSEVRMPIVESTPLFARAIGEVTDVVSKEMYTFWDNDEQLTLRPEGTAGCVRAAIEHGWIYNNEQRLWYIGPMFRHERPQKGRYRQFHQVGVEVFGIANPEIDAELIMLTYRLWKALGIDQHVTLQLNSIGSLEARANYRSALVGFLENHQDLMSDEEKERLVRNPLRILDTKNPELQKVLDNAPKLLDYLDDESRAHFEQLCSLLDAVGIQYEINPKLVRGLDYYNKTVFEWVTSALGAQGTVCGGGRYDGLVEQLGGHATPSIGFAMGLERLVLLVQEVNPNIPAKSAVDIYVVYQGEGATLAAFELAEKVRSELPHLNTMLHCSSGNFKKQFKRADKSGATLALVIGESEVQNKQVVVKHLQGGTDQQTLDLVNIIDYLQTQF

SEQ ID NO: 725 - DNA, 615 bp, Haemophilus influenzae
atggcttattccattgaagaagaacaagagattaaccagttaaaagactggtggaaagagaatggcaaaacaattattgtcgcttttatcttaggtgtgggtggtatgtttggatggcgttattggcaaacccaccaagtagaacaaatcgctcaagcttctgcacaatacgatactttaattaattctgtgcaacaagacgaacaggctaaaaaagcaaatatagaacaatttgtgcaagcgaatagcaaaactgcatacgctgtatttgctttgttagatgaagcgaaaaaagccactgaaaaacaagatttttcagcagcagaagcaaatttaaaccaagcattaacccaatctcaagatgaagtattaacatctattgttgcattacgtctcagtgcagtacaatttcaattgggtcaattagacaatgctttaaccaccttaaaccaagtgaaaggcgaaagttttaatgctcgcaaagcgattttaactggcgatatccaagttgcaaaaggagataaagttgcggcgaaaaacagctttgagcaagcacaacaaagtggtagccaattagaacaacaaatggcaaaaatgaaattaaacaacctttaa

SEQ ID NO: 726 - protein, 204 aa, Haemophilus influenzae
MAYSIEEEQEINQLKDWWKENGKTIIVAFILGVGGMFGWRYWQTHQVEQIAQASAQYDTLINSVQQDEQAKKANIEQFVQANSKTAYAVFALLDEAKKATEKQDFSAAEANLNQALTQSQDEVLTSIVALRLSAVQFQLGQLDNALTTLNQVKGESFNARKAILTGDIQVAKGDKVAAKNSFEQAQQSGSQLEQQMAKMKLNNL

SEQ ID NO: 727 - DNA, 195 bp, Haemophilus influenzae
atgaaatggacagacgcccaattaattgcagaagaactttacgatcgtaatccagatttagatccaaaaacagttcgttttactgatttacataaatggatttgtgaacttgaagattttgatgacgatccgaataagtcaaatgaagcgattcttgaggctattttattaaaatggttagatgaatttgaataa

SEQ ID NO: 728 - protein, 64 aa, Haemophilus influenzae
MKWTDAQLIAEELYDRNPDLDPKTVRFTDLHKWICELEDFDDDPNKSNEAILEAILLKWLDEFE

SEQ ID NO: 729 - DNA, 342 bp, Haemophilus influenzae
atgccaaaagtgatttttttacctaatgaagatttttgtcctgaaggtatggtcgttgatgctgcaacaggagataacttattagaagttgctcacaatgcgggagtagaaattcatcacgcttgtgatggttcttgtgcttgtacaacttgccacgtgattgttcgtgaggggtttgattctttaaatgaaacgagtgatcaagaagaagatatgctagataaggcttggggattagaaatggatagccgtttatcttgtcaatgcgtcgtgggaaatgaagatcttgtggtagaaattccaaaatataaccttaatcacgcaaatgaggcggctcactaa

SEQ ID NO: 730 - protein, 113 aa, Haemophilus influenzae
MPKVIFLPNEDFCPEGMVVDAATGDNLLEVAHNAGVEIHHACDGSCACTTCHVIVREGFDSLNETSDQEEDMLDKAWGLEMDSRLSCQCVVGNEDLVVEIPKYNLNHANEAAH

SEQ ID NO: 731 - DNA, 1860 bp, Haemophilus influenzae
atggcattattacaaattgcagaaccaggacaagctgcggcaccgcatcaacatcgtttagccgttgggattgatttgggaacaaccaattctttggttgcatccgtgcgtagcgggcaatccgtgattcttaatgatgaacaagaacgcagtcttgtgccgtcagttgttcattatggcgttgaagagaagaaagttggtttagaagcctttgaacaagcctcacttgatccaaaaaatacggtgatttcagtaaaacgcttaattggtcgcagcctttctgatgttcagtctcgttattctagtttgccttatgaatttgtggcgagtgaaaatggattacctttaattattacggcacaggggcctaaaagtccaattgaagtgtcttcagatattttatcgcgcttaaatcacattgcagaacaacgccttggaggtgagctttctggggttgtgattacggttccagcttattttgatgatgctcaacgacaaagtactaaagatgctgcgcgtttagctgggctaaatgtattacgcttattgaatgaacctactgcagctgcacttgcttatggattggatagtgggcaagaaggcattattgcggtttatgatttaggcggtggcacatttgatatttcaattttacgcttatcaaaaggtatctttgaagttttagcaacggggggagacactgcattaggtggagatgattttgatcatttaattgcagattggataatagaacaaactaagctaaaaccacaaacagcaaatcaacagcgtgagctaataacccttgccaaccaagctaaaattaccttgactaatgaaaaaagtgcggttatttcttggcaagatttttcagtagagatttcgcgggaacaattcaatgaattaatttatccgcttgtaaaacgttcattgctaacttgtcgtcgggcattgaaagatgccaatgtggaatccgaagaagtgcaagccgtagtaatggttggtggttcaactcgcgtgccttatgtaagagaacaagttggcgagttttttggtaaaacaccattaacctcaatcgatcctgataaagttgtggcacttggtgctgcaattcaagcagatattttagtcgggaataaaactgattctgatatgttattacttgatgttgtcccgctttccttaggcattgagacgatgggcggattagtggaaaaaattattccacgtaatacaacaattcctgtggctcgtgcgcaagagtttactacttttaaagatgggcaaacggcaatgactgttcatgtgctacaaggcgaacgagagctagtcgatgattgtcgttctttaggacgctttactctacgaggtattccgccaatggcggcgggggcagcccatattagagtgacttatcaagtggatgcagatggtttattaagcgttacagcgatggaaaaatcgacaaaagtacaggcttcaatacaaattaaaccatcttatggattaactgatgaagaagtaaccgcaatgattaaatcttcttttgataatgcacaagaagatttacaagcacgtgaattggcagagcagcgtgtggaagcagatcgtgttattgaaagcgtgattgttgcactacaagcagatggggctgaattgcttagcacagatgaatttcatcatattgaaactgtgttaaaacaattaatggatgtaaaacaaggttcagatcgcgatgcaattgcgcaaggaattaaagccttagacactgctacccaagaatttgctgctcgccgaatgaatgcatcaattaataaagctttgacaggtaaaaatctgtcagacattgaaaatccgtaa

SEQ ID NO: 732 - protein, 619 aa, Haemophilus influenzae
MALLQIAEPGQAAAPHQHRLAVGIDLGTTNSLVASVRSGQSVILNDEQERSLVPSVVHYGVEEKKVGLEAFEQASLDPKNTVISVKRLIGRSLSDVQSRYSSLPYEFVASENGLPLIITAQGPKSPIEVSSDILSRLNHIAEQRLGGELSGVVITVPAYFDDAQRQSTKDAARLAGLNVLRLLNEPTAAALAYGLDSGQEGIIAVYDLGGGTFDISILRLSKGIFEVLATGGDTALGGDDFDHLIADWIIEQTKLKPQTANQQRELITLANQAKITLTNEKSAVISWQDFSVEISREQFNELIYPLVKRSLLTCRRALKDANVESEEVQAVVMVGGSTRVPYVREQVGEFFGKTPLTSIDPDKVVALGAAIQADILVGNKTDSDMLLLDVVPLSLGIETMGGLVEKIIPRNTTIPVARAQEFTTFKDGQTAMTVHVLQGERELVDDCRSLGRFTLRGIPPMAAGAAHIRVTYQVDADGLLSVTAMEKSTKVQASIQIKPSYGLTDEEVTAMIKSSFDNAQEDLQARELAEQRVEADRVIESVIVALQADGAELLSTDEFHHIETVLKQLMDVKQGSDRDAIAQGIKALDTATQEFAARRMNASINKALTGKNLSDIENP

SEQ ID NO: 733 - DNA, 687 bp, Haemophilus influenzae
atgcaaactcttgaacagctcactagtccagaacattctgcttggataaccctttcccaatggattgataacgttcgcaatcattgtgaagtaattaaaaaagatcaatccagtgcggagcgtgagctttttactatgcaaatgccaacatcctcgccaatgggtgcagtaatctatgaaacaggtggaattttaattcattatggttggttacgtattttaggttctggaagttttaaattaccgcgtggcttgatggattggaatttcagtaaatcttttagtgagtcaggcgaaaaaccaaaatatttattagttgcagatgatgtgattggtggttattttgcgttaaatggtggttcgttaggcaataatattggaaaaatttattactattcatcaaaagatcttacttggcataatttaaattttacttacacagaatttttagcttgggcattgaatggcgatgtagaggccttttatcaagggctattttggaaaaattggcaagatgatgtaaaacaattagatggtaaccaagtttttgtatttacgcctgatttaaaccaagacagaaaaatagcaattgatgaacgtcaaaaacaggaagtcaatattgaaacccattaccaagcaagctttgcagaaaaaaataaatttgatttggcgtattccgtcgcataa

SEQ ID NO: 734 - protein, 228 aa, Haemophilus influenzae
MQTLEQLTSPEHSAWITLSQWIDNVRNHCEVIKKDQSSAERELFTMQMPTSSPMGAVIYETGGILIHYGWLRILGSGSFKLPRGLMDWNFSKSFSESGEKPKYLLVADDVIGGYFALNGGSLGNNIGKIYYYSSKDLTWHNLNFTYTEFLAWALNGDVEAFYQGLFWKNWQDDVKQLDGNQVFVFTPDLNQDRKIAIDERQKQEVNIETHYQASFAEKNKFDLAYSVA

SEQ ID NO: 735 - DNA, 525 bp, Haemophilus influenzae
atgttcaatccttttcaaatttttgatttgccagttgattttcagctggatgaaaaagtactaaatgcacgttatttaaaattacaaaaggccctacatccagataattttgtctcaagtagtgctttagatcaacgtgttgcgatgcaaaaatctaccgaagtgaatgatgccttaaaaacattaaaagacccaattttgcgagctgaagcgatcattgctcttaatactggtgagcagttagatcttgaacaaaaaagcacgcaagatgtggcgtttttaatgcaacagttacagtggcgcgaacaattagaagaagttgaaagccagaaagatgaaagagcattaaatgcttttgcgaaagaaattaaacaagaaactcaatcattattgaccgcactttttgagagtttgaaatctcaacaatgggcgagagcatctcaatactgtgataaattacgttttacccataaactttctgaagaaattgaacgtgtggaagaacgaatttttgaattagattaa

SEQ ID NO: 736 - protein, 174 aa, Haemophilus influenzae
MFNPFQIFDLPVDFQLDEKVLNARYLKLQKALHPDNFVSSSALDQRVAMQKSTEVNDALKTLKDPILRAEAIIALNTGEQLDLEQKSTQDVAFLMQQLQWREQLEEVESQKDERALNAFAKEIKQETQSLLTALFESLKSQQWARASQYCDKLRFTHKLSEEIERVEERIFELD

SEQ ID NO: 737 - DNA, 324 bp, Haemophilus influenzae
atgggtattacattaacagaaaaagcagcgcagcgagtgaaagcctttttggataatcgtggtaaaggtattggattacgtttaggtgtgaaaacatcaggttgttctggcttagcttatgtacttgagtttgtagatgttttaaattccgaggatcaagtttttgagcagcacggtgttaatattattgtcgatccaaaaagtctcgtttatctcaatggcattgagctggattatgtaaaagaaggcctaaatgaaggctttaaatataataatccaaatgtaaaagaatcttgtggttgtggcgaaagtttccacgtttaa

SEQ ID NO: 738 - protein, 107 aa, Haemophilus influenzae
MGITLTEKAAQRVKAFLDNRGKGIGLRLGVKTSGCSGLAYVLEFVDVLNSEDQVFEQHGVNIIVDPKSLVYLNGIELDYVKEGLNEGFKYNNPNVKESCGCGESFHV

SEQ ID NO: 739 - DNA, 381 bp, Haemophilus influenzae
atggcttatagcgaaaaagtaattgatcattatgaaaatccacgtaatgtgggatcattggataaaaaagatagcaatgttggtactggaatggttggtgcgccagcttgtggtgatgttatgcaactacaaatcaaagtagatgataatggcattattgaagatgcaaaattcaaaacttacggctgtggttctgcgattgcatctagttcattaattactgagtgggtaaaaggtaaatctttagaagaagctggagcaattaaaaatagccaaattgctgaagaattagaattaccgccagtgaaagtgcattgctctattttagcagaagatgcaattaaagcagcaattgctgattataaagcaaaacaaggctaa

SEQ ID NO: 740 - protein, 126 aa, Haemophilus influenzae
MAYSEKVIDHYENPRNVGSLDKKDSNVGTGMVGAPACGDVMQLQIKVDDNGIIEDAKFKTYGCGSAIASSSLITEWVKGKSLEEAGAIKNSQIAEELELPPVKVHCSILAEDAIKAAIADYKAKQG

SEQ ID NO: 741 - DNA, 1215 bp, Haemophilus influenzae
atgaaattacctatttatttagactacgcagcgacctgtccagtcgatgaacgtgttgcgaaaaaaatgatggcgtttctaaccatcgatggcacatttggtaatccagcctctcgctcacataaatttggttggcaagcagaagaagctgttgatattgcgcgtaatcaaatcgctgatctcattggtgcagattctcgtgaaattgtctttacttctggtgcgacagaatctgacaacctcgctattaaaggtgcggcgcatttctatcaaactaaaggtaaacacattcttacctgtaaaactgaacataaagcagtgttagatacttgccgtcaattagaacgagaaggttttgaagtcacttatttgtctccagaagctgatggtttaattgatttagaaaaattcaaagctgcgcttcgtccagatacaattctagcttcaattatgcacgctaataatgaaattggtgtgttacaagatattaaagctattggcgaactttgtcgtgcaaataaaacaattttccatgtggatgcaactcaaagtgttggtaaagttgaaattaatttggaagaattagctgttgatttaatgtcgatgtctagccataaactttatgggccaaaaggtgttggcgcattgtatgttcgtcgtaaacctcgcgtacgtttagaggcgattattcatggtggtggtcacgaacgtggtatgcgttcaggtacattacctgttcatcaaatcgtaggaatgggagaggcatatcgaattgcaaaagaagaaatggcatcagaaatgccgcgcttaaaagcacttcgtgatcgtttatataatggcttaaaagatattgaagaaacttatgtaaatggttcaatggaacatcgtttagatagcaatttaaatattagttttaactatgttgagggggaatccttaatgatggcgttgcgcgatattgctgtctcttctggttctgcttgtacatctgctagcttagagccatcttatgtattgcgcgcacttggcttaaatgatgaattggcgcacagttcaattcgtttcacattaggtcgttatactactgaagaagaaattgattacacaattaatttaatgaagggcgcggtagaaaaacttcgtgcattatcgccattatgggatatgtttaaagaaggtattgatttaaataccattgagtggtcagctcactaa

SEQ ID NO: 742 - protein, 404 aa, Haemophilus influenzae
MKLPIYLDYAATCPVDERVAKKMMAFLTIDGTFGNPASRSHKFGWQAEEAVDIARNQIADLIGADSREIVFTSGATESDNLAIKGAAHFYQTKGKHILTCKTEHKAVLDTCRQLEREGFEVTYLSPEADGLIDLEKFKAALRPDTILASIMHANNEIGVLQDIKAIGELCRANKTIFHVDATQSVGKVEINLEELAVDLMSMSSHKLYGPKGVGALYVRRKPRVRLEAIIHGGGHERGMRSGTLPVHQIVGMGEAYRIAKEEMASEMPRLKALRDRLYNGLKDIEETYVNGSMEHRLDSNLNISFNYVEGESLMMALRDIAVSSGSACTSASLEPSYVLRALGLNDELAHSSIRFTLGRYTTEEEIDYTINLMKGAVEKLRALSPLWDMFKEGIDLNTIEWSAH

SEQ ID NO: 743 - DNA, 453 bp, Haemophilus influenzae
atgaaacttacatcgaaaggtcgttatgcagttacagccgttttagatattgctttaaatgcagatggcgggcctgtaagccttgcggatatttctgaacgccaacatatttccttatcttatttagagcaactttttgctaaattacgtaaagacggtttagtcaaaagtgttcgcgggccaggaggtggttatcagttagggctaccaagtgaacaaatttctgtaggaatgattattgcggcagtaaatgaaaatattcacgtaacgaaatgtctggggcgtgaaaattgtaaaaatggtgtggaatgtttaactcacaaactttgggaagatttaagtttacgtattgaaagttttttaaatgagattacgttagcagagctggtaaataagcgtaatgtaaaacgtcaatctcatcgtgattttaataatttattagttaatcaataa

SEQ ID NO: 744 - protein, 150 aa, Haemophilus influenzae
MKLTSKGRYAVTAVLDIALNADGGPVSLADISERQHISLSYLEQLFAKLRKDGLVKSVRGPGGGYQLGLPSEQISVGMIIAAVNENIHVTKCLGRENCKNGVECLTHKLWEDLSLRIESFLNEITLAELVNKRNVKRQSHRDFNNLLVNQ

SEQ ID NO: 745 - DNA, 726 bp, Haemophilus influenzae
atgttggataatattcgtattgttttaattgaaacttcgcacagtggtaatattggttctgcggctagagcaatgaaaacgatgggattgacccagctttgtcttgtttcacctaaatctgttgatgaacaatcttatgccctttcagctggcgcagaaaatattgtaaaaaatgctagggttgtcgatagttttgatgaagccgtcgatgattgctctttggtaattggaacaagtgctcgcttacgtcatttacaaaatacattgatcgagcctcgagaatgcgcggagaaagttgtagcgtataaaggcaagatagctattgtgtttggtcgtgagcgtattggattaaccaatgaagaactgctgaaatgtcattatcacttgaatattccagcgaatcctgattattcttctttaaatttagcaatggctgtgcaactggtaagttatgaattgcgtatggctttcttagttcaaaataataagaaaaattcactttctttaatagagaaaaactatccaacaacagatcagttagcttatttttttgactacacagaacgtatatatcagtctcttggatttattcaaaatcaaggagttatgcgtaaattaaagcgtttatactatcgtgcaaaattagagaaaaacgaattaaatattttaaatggcatgctaagtgcggttgaaaaacgaattgatttaacaaaagaggataattga

SEQ ID NO: 746 - protein, 241 aa, Haemophilus influenzae
MLDNIRIVLIETSHSGNIGSAARAMKTMGLTQLCLVSPKSVDEQSYALSAGAENIVKNARVVDSFDEAVDDCSLVIGTSARLRHLQNTLIEPRECAEKVVAYKGKIAIVFGRERIGLTNEELLKCHYHLNIPANPDYSSLNLAMAVQLVSYELRMAFLVQNNKKNSLSLIEKNYPTTDQLAYFFDYTERIYQSLGFIQNQGVMRKLKRLYYRAKLEKNELNILNGMLSAVEKRIDLTKEDN

SEQ ID NO: 747 - DNA, 462 bp, Haemophilus influenzae
atgaacaaatttgttaaatcattattagttgcaggttctgtagctgcattagcagcttgtagttcatctaacaacgatgctgcaggcaatggtgctgctcaaacttttggcggttactctgttgctgatcttcaacaacgttacaataccgtttatttcggttttgataaatatgacattactggtgaatacgttcaaatcttagatgcgcacgctgcatatttaaatgcaacaccagctgctaaagtattagtagaaggtaacactgatgaacgtggtacaccagaatacaacatcgcattaggccaacgtcgtgcagatgcagttaaaggttatttagctggtaaaggtgttgatgctggtaaattaggcacagtatcttacggtgaagaaaaacctgcagtattaggtcatgatgaagctgcatattctaaaaaccgtcgtgcagtgttagcgtactaa

SEQ ID NO: 748 - protein, 153 aa, Haemophilus influenzae
MNKFVKSLLVAGSVAALAACSSSNNDAAGNGAAQTFGGYSVADLQQRYNTVYFGFDKYDITGEYVQILDAHAAYLNATPAAKVLVEGNTDERGTPEYNIALGQRRADAVKGYLAGKGVDAGKLGTVSYGEEKPAVLGHDEAAYSKNRRAVLAY

SEQ ID NO: 749 - DNA, 1284 bp, Haemophilus influenzae
atgaaattattaaaacgtttagtgagcgtattagcgattgtacttgctgttggaagcaatgcattcgctggcgatgaagtacgcattgtcattgatgaaggggttgatggtgcgcgccctatcgctgtcgtgccatttgttggttctgcaccagaagatattagtaaaattgttgcagatgatttacgtaacagtggtaagtttaatcctattgcggtgtctcaaatgcctcaacacccaacttcagctgcagaggtgaatcctgaggcttggtcgaatattggaattgacgcaattgtaattggacaagttgttccatcgggtaatggttatagtattacttatcaattaattgatacggttggtgcatcaggtacgccaggggctgtattaatgcaaaatagctatacagtaacaaataaatggttacgctatggcgcacatactgtgagtgatgaagtttttgaaaaattaactgcgatccgtggtgcctttagaactcgtatcgcttatgttgtgcaaaaaaatggcggttcgcaaccttatgaaattcgtgtagcagattatgatggctataatcaatttatcgtcaatcgtagtgcccaaccaattatgtctccagcttggtctccagacggccagcgtttggcttatgtatcgtttgaaaataaaaaatcacaacttgttgtacaggatttaaattctggcgcacgtaaagtagtggcatcttttcaagggcataatggcgcaccagccttttcgccagatggttctcgtttagcttttgcttcttctcgtgatggtgttctgaatatttacgttatgggcgcaaatggtggtacacctactcaattgacgagtggtgcgggtaataatactgaaccagcgtggtcgccagacggaaattcaattttatttacatccgatagaagtggttcgccacaagtttatcgaatggatgcaagcggtggtagtgcaacagcagtgggtggtcgcggcagcgcgcaaattagtgcagatggaaaaacacttgtgatgattaatggtaacaataatgtagttaaacaagatctcacaacgggcgtttcagaggtacttagtacatcttttctaggcgaaagtccaagcctctctccaaatggaattatgattatttatagttctacacagggcttaggaaaggtgctacaattggtttctgcagatggtcgctttaaggcgagccttccaggaagtgatggtcaagttaaatttccagcttggtctccatacttaactaaataa

SEQ ID NO: 750 - protein, 427 aa, Haemophilus influenzae
MKLLKRLVSVLAIVLAVGSNAFAGDEVRIVIDEGVDGARPIAVVPFVGSAPEDISKIVADDLRNSGKFNPIAVSQMPQHPTSAAEVNPEAWSNIGIDAIVIGQVVPSGNGYSITYQLIDTVGASGTPGAVLMQNSYTVTNKWLRYGAHTVSDEVFEKLTAIRGAFRTRIAYVVQKNGGSQPYEIRVADYDGYNQFIVNRSAQPIMSPAWSPDGQRLAYVSFENKKSQLVVQDLNSGARKVVASFQGHNGAPAFSPDGSRLAFASSRDGVLNIYVMGANGGTPTQLTSGAGNNTEPAWSPDGNSILFTSDRSGSPQVYRMDASGGSATAVGGRGSAQISADGKTLVMINGNNNVVKQDLTTGVSEVLSTSFLGESPSLSPNGIMIIYSSTQGLGKVLQLVSADGRFKASLPGSDGQVKFPAWSPYLTK

SEQ ID NO: 751 - DNA, 1041 bp, Haemophilus influenzae
gtgattgttgatactggtacggctgctcaggaatgggggcgtattcaacaacaaaaaaaagggcaagcggataaacaaaaacgcccagaacctgttgtggaagaaaaaccacctgagcctaatcaagaagagattaagcatcgacaagaagttcaacgacaagaagttcaacgacaagaagagattaagcatcaacaagaagttcaacgacaagaagagttaagacgtcagcaagaacagcaacgtcagcaagaaataaaaaaacaacaagagcaagctcgtcaagaagcgttggaaaaacagaagcaagctgaagaggctagggctaaacaagcggctgaagctgcaaaattaaaagcagatgcagaggctaaacgtttagctgctgcggcaaaacaagctgaagaagaggctaaagcgaaagcagcagaaattgctgctcaaaaagcaaaacaagaggcggaagctaaggcgaaactagaagcggaagctaaggcgaaactagaagcggaagctaaggcaaaagccgctgctgaagctaaagcaaaggctgaagcggaggcaaaagcgaaagcggcagctgaggcaaaagcaaaagctgatgcagaagctaaagctgctacggaagcgaaacgtaaagcagatcaagcaagcctagatgatttcttaaatggcggagatattggtggcggtagtgcatctaaagggggaaacacaaataaaggtggaactcaaggtagcggtgctgcacttggctctggcgatggtggtaaggttggggatcaatacgcaggtgtaattaagaaagagattcaacgtcgtttcttaaaagatccaaattttgcaggaaaggtttgtcgtattaaaattcaattaggtcgagatggcacaatcttggggtatcaaaaaatttcaggctctgatgatatttgttcagctgcattaagtgcggtggctagaacgaaaaaagttccagctgcgccatcagatgaaatttatgaaaaatataaatcaccaattattgactttgatattcgataa

SEQ ID NO: 752 - protein, 346 aa, Haemophilus influenzae
MIVDTGTAAQEWGRIQQQKKGQADKQKRPEPVVEEKPPEPNQEEIKHRQEVQRQEVQRQEEIKHQQEVQRQEELRRQQEQQRQQEIKKQQEQARQEALEKQKQAEEARAKQAAEAAKLKADAEAKRLAAAAKQAEEEAKAKAAEIAAQKAKQEAEAKAKLEAEAKAKLEAEAKAKAAAEAKAKAEAEAKAKAAAEAKAKADAEAKAATEAKRKADQASLDDFLNGGDIGGGSASKGGNTNKGGTQGSGAALGSGDGGKVGDQYAGVIKKEIQRRFLKDPNFAGKVCRIKIQLGRDGTILGYQKISGSDDICSAALSAVARTKKVPAAPSDEIYEKYKSPIIDFDIR

SEQ ID NO: 753 - DNA, 420 bp, Haemophilus influenzae
atggctcgtcgtcagcgtaaagcaattaaatctgaaattaatattgtgccttttttagatgtgcttttagttttagtgttaatttttatggcaaccgcccctattattagtcaaagcgttcaagttgaattgcctgattctgtgcaaagccaagaggtttctaatgaagataaagtgcccgtcattcttgaagtggcaggtattggaaaatatgcgatttctattggcggagaacgtcaagaaggtttaacagaagaaatggttactcaattatctagacaggaatttgataaggataataatacgctatttttagtaggcggagctaaagaagtaccttatgaagaagtgattaaggcattgaatttacttcatcttgcaggcattaaatctgtaggtttaatgacaaatcccatttag

SEQ ID NO: 754 - protein, 139 aa, Haemophilus influenzae
MARRQRKAIKSEINIVPFLDVLLVLVLIFMATAPIISQSVQVELPDSVQSQEVSNEDKVPVILEVAGIGKYAISIGGERQEGLTEEMVTQLSRQEFDKDNNTLFLVGGAKEVPYEEVIKALNLLHLAGIKSVGLMTNPI

SEQ ID NO: 755 - DNA, 687 bp, Haemophilus influenzae
atgactgcagaattgaattttttagatctttttctaaaagcaagtattgttgtgcaactggtaattgtgattttgatttctttctcaatcatatcttgggcaattatcattcaacgtagccgtattttaacgaatgccttaaaagaagcacgtacgtttgaagatcgtttctggtcaggagaagatttaaataaactttatgaagggctatctaatcgtcgcgatggattaacgggcagcgaacaaattttttgcgtgggatttaaagaattttcacgtttaaaacaagtaaatccagacgcacctgaagcgattattaaaggcacaatgcgcgcgatgaatcttgcgatgaaccgtgagattgaaagtttggaaaatcgagttccatttttagccacagtggcatctgttagcccttatattggtttattcggcactgtttggggaattatgcacgcttttatggcattaagtggtgcaaaacaagcaacgttacagatggtagcgccaggtatcgctgaggccttgattgccactgcgattggtttatttgccgcaattcctgcagtaatggcttataaccgtttaagcttacgagtgaatgccattgaacaagattacggtaactttattgatgaatttacgacgattttacaccgtcaagcctttggtaaagcccctcactaa

SEQ ID NO: 756 - protein, 228 aa, Haemophilus influenzae
MTAELNFLDLFLKASIVVQLVIVILISFSIISWAIIIQRSRILTNALKEARTFEDRFWSGEDLNKLYEGLSNRRDGLTGSEQIFCVGFKEFSRLKQVNPDAPEAIIKGTMRAMNLAMNREIESLENRVPFLATVASVSPYIGLFGTVWGIMHAFMALSGAKQATLQMVAPGIAEALIATAIGLFAAIPAVMAYNRLSLRVNAIEQDYGNFIDEFTTILHRQAFGKAPH

SEQ ID NO: 757 - DNA, 411 bp, Haemophilus influenzae
atgttggataattgcttttcttttcctgttcgtgtgtattatgaagatactgatgcaggtggcgtagtgtatcacgctcgctatttgcatttttttgaacgagcaagaacagaatgtttgcgtacattaaattttacgcaacaaaccttactagaggaacaacaactcgcatttgttgtcaaaacgctcgccattgattattgcgtggcagcaaaattggatgatttacttatggtggaaacagaggtttcagaagtaaaaggggctacaatcctttttgaacagagactgatgcgcaacaccctgatgttatcaaaggctactgttaaggtagcctgtgttgatctaggcaagatgaaacctgtggcgtttcccaaagaagttaaagcggcgtttcatcacttaaaataa

SEQ ID NO: 758 - protein, 136 aa, Haemophilus influenzae
MLDNCFSFPVRVYYEDTDAGGVVYHARYLHFFERARTECLRTLNFTQQTLLEEQQLAFVVKTLAIDYCVAAKLDDLLMVETEVSEVKGATILFEQRLMRNTLMLSKATVKVACVDLGKMKPVAFPKEVKAAFHHLK

SEQ ID NO: 759 - DNA, 1923 bp, Haemophilus influenzae
atggattacgaaaatcaaattgccaatattttctcactaaatggcgaattaagccaaaatatcaaaggttttcgtcctcgagctgaacaacttgaaatggcacatgctgtaggtaaagcaattcaaaataaatcttctcttgtagttgaagctggaacgggtacaggaaaaacctttgcatatctcgcgcctgctttagtttttggtaaaaaaaccattatttctacaggatctaaaaatcttcaagatcagctttttaatcgagatcttccagctattaaaaaagcccttaatttcacgggaaaaattgcgttgctaaaaggtcgggcaaactatctttgtttagagcgtttagatcaagtgattgctcaaggtgtgcttggagataagtctgttttagctgaattaagtaaagtacgaaaatggaataatagtactaaaacaggcgatttcacagaatgtatcgagcttgcagaagatagcccaattattcctcaactgacgagtacagctgaaagttgtttaggcaccgattgccctaattattcagaatgttatgtagcaagtgcgcgtaaaaaagcattaaatgcggatttggttgtagttaatcatcatttattttttgctgatatggctgtgaaagaaagtggttttggcgaacttattccaaatgcagaagtgattatttttgacgaagctcatcagttacccgatattgccagtcaatattttggtcaatctttaacatcacgccagctttttgatttgtgtaaggatattaatattgtttaccgcacagaacttaaagatatgcagcagcttggcacaacatctgataccttactgaaagtggtacaagattttcgtttattactgggtaatgggagtaatgttcgaggaaattggcgtgagctttacaagcaaagtgcggtgaaaaaatcctttgaattattacaagagaaaatagattttttatctgaagtaattaaattagcacttggtcgttcccaaactttagacagtatttttgagcgtgttgagtccattaaaatccaactcaaacgtttatctgaaacaaatattgtgggttattgttattggtatgaaggaaatggtcgccagtttggtttacatattacgccattgacagtagctgataaatttggtgctcagctcgaagcgaaagaagccgcttggatattcacatctgcgacattagaagtggggggaacttttaatcatttctgccaacgtttaggcattgaaaatgcgacacaaaaaattttatatagtccctttaattattctgagcagtctttgctttgtgtgcctcgatatttgccgaataccaatcaagtgaatacattaaattcactaggcgaaatgttattacccgtgattgaagcaaacaaagggcgttgttttgttctttgcacttcttattcaatgatgcgtggtttagcagaatatttccgtgaaaaaagtcatctttcgattttattacaaggcgaaacctcaaaaagcaaattactcgaacaatttataaaagaaacgcatagcgttttggtggcaacttctagcttttgggaaggtgtagatgtacgcggcgatgcactttctttagtgattattgataaacttccttttactgcgccagatgagcctttgttgaaagctcgcattgaggattgtcgtttacaaggtggcgatccattcaatgatattcaaattcctgaagcggtaattaccttgaaacaaggcgttggacgtttaattcgtgatgttacagatcgtggcgttgtgattatttgtgataatcgattagtgatgcgcaattatggcgaaacttttttgaaaagtttacctaactcaagtcgtacccgtgatctcaacaaagtgatacaattcttacaaaataagtaa

SEQ ID NO: 760 - protein, 640 aa, Haemophilus influenzae
MDYENQIANIFSLNGELSQNIKGFRPRAEQLEMAHAVGKAIQNKSSLVVEAGTGTGKTFAYLAPALVFGKKTIISTGSKNLQDQLFNRDLPAIKKALNFTGKIALLKGRANYLCLERLDQVIAQGVLGDKSVLAELSKVRKWNNSTKTGDFTECIELAEDSPIIPQLTSTAESCLGTDCPNYSECYVASARKKALNADLVVVNHHLFFADMAVKESGFGELIPNAEVIIFDEAHQLPDIASQYFGQSLTSRQLFDLCKDINIVYRTELKDMQQLGTTSDTLLKVVQDFRLLLGNGSNVRGNWRELYKQSAVKKSFELLQEKIDFLSEVIKLALGRSQTLDSIFERVESIKIQLKRLSETNIVGYCYWYEGNGRQFGLHITPLTVADKFGAQLEAKEAAWIFTSATLEVGGTFNHFCQRLGIENATQKILYSPFNYSEQSLLCVPRYLPNTNQVNTLNSLGEMLLPVIEANKGRCFVLCTSYSMMRGLAEYFREKSHLSILLQGETSKSKLLEQFIKETHSVLVATSSFWEGVDVRGDALSLVIIDKLPFTAPDEPLLKARIEDCRLQGGDPFNDIQIPEAVITLKQGVGRLIRDVTDRGVVIICDNRLVMRNYGETFLKSLPNSSRTRDLNKVIQFLQNK

SEQ ID NO: 761 - DNA, 711 bp, Haemophilus influenzae
atgcaaaatttaactttattggcgttggacacctctactgaagcctgttctgtcgctttattgtatcgtggtgagaaaacacatattaatgaactagcccaacgcacacacactaaacgaattttacctatgatcgatgaaattttggtaaattcgggtttaggtttaaatcaagttgatgctttagcttttgggcgtgggcctggtagttttactggtgttcgtgttggtgctgggattgcacaaggtttggcgtttggtgcggatttgcctgtcattccaatttcaaatttaaccgcaatggctcaggcagcatttgaattacatcaagcagaaaatgttgttgcagcgattgatgcgagaatgaacgaagtctatttttctcaagtagtgagagaaaaagtgcggtcagattttggggaattttttcaatggcgagaaatcattagcgaacaagtttgttctccagaactagcgattaaccagcttcaaaatgataacgcatttagagtcgggacaggttgggctgcttattctcaatttactgaaaaaaatctaactggctcagatatagaattgcctaatgccttatatatgttagaacttgcgcaggtagaatacttgcaaaaacacacaatttcagctttagagattgaaccgatttatttgcgtaacgaagttacttggaaaaaattaccaggacgtgaataa

SEQ ID NO: 762 - protein, 236 aa, Haemophilus influenzae
MQNLTLLALDTSTEACSVALLYRGEKTHINELAQRTHTKRILPMIDEILVNSGLGLNQVDALAFGRGPGSFTGVRVGAGIAQGLAFGADLPVIPISNLTAMAQAAFELHQAENVVAAIDARMNEVYFSQVVREKVRSDFGEFFQWREIISEQVCSPELAINQLQNDNAFRVGTGWAAYSQFTEKNLTGSDIELPNALYMLELAQVEYLQKHTISALEIEPIYLRNEVTWKKLPGRE

SEQ ID NO: 763 - DNA, 552 bp, Haemophilus influenzae
atgaaaggaaaaatcaccttattttttaccgcactttgtttcggattaacgggctgtattgcaccaccaaaagggttagaaaaagagcgattctcaattaattcctatcgcgagatttctcctcaggatttgacctgtcattgtaaaacagttcgacttggaggaaaaattatcaatactaccgttttagcaaatcaaacaaaaattgaagtgttaagtttacccgtatcatcaatttcaggtaaaccatttgttgaattgcaatccgatggtcgctttatcgtgtatttcaacggttttgttgagcctgaaaatttaaaagaacgttatattactgtaggtggtcaattagctggaacagagaaaggcaaaatagaacaagctgattatacttatcctgttgttcaagcggataaataccgtatttggacactcagtaccatctatgagtatccaacagatgattgggatgaagatgatgattggggattttttagatggagacatcgcccttggtatgttcagcctgaaattcactattatttgaattaa

SEQ ID NO: 764 - protein, 183 aa, Haemophilus influenzae
MKGKITLFFTALCFGLTGCIAPPKGLEKERFSINSYREISPQDLTCHCKTVRLGGKIINTTVLANQTKIEVLSLPVSSISGKPFVELQSDGRFIVYFNGFVEPENLKERYITVGGQLAGTEKGKIEQADYTYPVVQADKYRIWTLSTIYEYPTDDWDEDDDWGFFRWRHRPWYVQPEIHYYLN

SEQ ID NO: 765 - DNA, 1689 bp, Haemophilus influenzae
atggaaaaaatttggtttcaaaattatccagaaggttctgaaaaatttttggatacctcaaaatatgaatctattttggatatgttcgacaaagcagtgcgcgaacatccagatcgccccgcttacattaatatggggcaagtacttactttccgtaaattagaagagcgcagtcgtgcatttgccgcgtatttgcaaaatgaatttaaacttcaacgtggagatcgcgtggcattaatgatgccaaatttattgcaatatcccatcgcactttttggtattttgcgggctggcttaattgcagtaaatgtcaatcctctttacacaccgagagaattagagctccagttgcaagatagtggtgcggtagcgattgtcgtggtatcaaattttgcttctaccttggaaaaagtcgttttcaataccaatgttaaacacgttattcttacccgaatgggcgatcaactttcttttggtaaacgtactttagtcaattttgtcgtaaaatatgtgaaaaaactggtgccgaaatataaattaccgcacgcagtgacgttccgagaagtattgagtattggtaaatatcgccaatatgttcgtccagaaatatcgcgtgaggatttagcctttttacaatacactggcggtacaactggcgtggcgaaaggtgcaatgctaacgcacggaaatattataaccaatgtcttccaagcaaaatggattgcagagccatttattggcgatcattctcgcactcgttcagctattttagccttgcctctttatcacgtatttgccttaacggtaaactgcttattatttttagagttaggtgtcacggcgatcttaatcaccaatccgagagatattgaaggatttgtgaaagaattgaaaaaatatcgttttgaagcaatcactggtgtgaataccttatttaatgcgttgttaaataatgaaaatttcaaagaagttgatttttctgcgttgaaactttctgtgggtggcggtatggctattcaacaatcagtggcaacacgttggcacgaattgacgggctgtaacatcattgaaggttatggaatgacggaatgttcgccattaatcgccgcttgtccgattaatgttgtgaaacataatggcactattggtgtgccagtgccaaatacagatataaaaatcattaaagatgatggctctgatgcaaaaattggcgaagctggcgaattatgggtgaaaggcgatcaagtaatgcgaggttattggcagagacctgaagcaaccagtgaagtgttaaaagacggttggatggcgactggcgatattgtcattatggatgaatcatatagcttacgcattgtagatcgtaaaaaagatatgattttggtttctggctttaatgtctatccaaatgaaattgaagatgtcgttatgctgaattacaaagtgtctgaggctgtggcaattggtgttcctcatgaagtttctggcgaaacgataaaaatctttgtggtgaaaaaagacgatagtttaactcgtgatgaacttcgcaaccattgtcgtcaatatctcaccggctataaagtgccaaaagaaattgagttccgagacgaactgccaaaaactaatgttggcaagattttacgtcgggttttacgcgatgaagagatcgcaaaacgttcaaaacattaa

SEQ ID NO: 766 - protein, 562 aa, Haemophilus influenzae
MEKIWFQNYPEGSEKFLDTSKYESILDMFDKAVREHPDRPAYINMGQVLTFRKLEERSRAFAAYLQNEFKLQRGDRVALMMPNLLQYPIALFGILRAGLIAVNVNPLYTPRELELQLQDSGAVAIVVVSNFASTLEKVVFNTNVKHVILTRMGDQLSFGKRTLVNFVVKYVKKLVPKYKLPHAVTFREVLSIGKYRQYVRPEISREDLAFLQYTGGTTGVAKGAMLTHGNIITNVFQAKWIAEPFIGDHSRTRSAILALPLYHVFALTVNCLLFLELGVTAILITNPRDIEGFVKELKKYRFEAITGVNTLFNALLNNENFKEVDFSALKLSVGGGMAIQQSVATRWHELTGCNIIEGYGMTECSPLIAACPINVVKHNGTIGVPVPNTDIKIIKDDGSDAKIGEAGELWVKGDQVMRGYWQRPEATSEVLKDGWMATGDIVIMDESYSLRIVDRKKDMILVSGFNVYPNEIEDVVMLNYKVSEAVAIGVPHEVSGETIKIFVVKKDDSLTRDELRNHCRQYLTGYKVPKEIEFRDELPKTNVGKILRRVLRDEEIAKRSKH

SEQ ID NO: 767 - DNA, 1143 bp, Haemophilus influenzae
atgataaaagaatgtcaaaatccaccgcactttagagtcatttcagataatgctgcgctattagaagtttgtaatttggctcagatgaaaagtgcggtcgccttagatacagaatttatgcgtgtttccacttattttcctaagttgggattaatccaactttatgatggcgagcgcgtctctttaattgatcctttagcgattacggatttttcgccttttgtcgcattgttagccaatcctaaggtattaaaaatcttacattcttgtagtgaagatttattggttttcttacaagaatttgatcagcttccacgcccaatgattgatacgcaaattatagcgcgctttcttgggcttggcacatcagcaggattggcaaaattagcacaacaatacttaaatgtagaaatcgataaaggtgcaactcgcaccaattggatcaaacgccccctttctgatattcaacttcaatatgctgcaggcgatgtttggtatttgttgccactttatcatattcttgaaaaagagttagctaaaacaccttgggaacaagcagtaagagatgattgcgaacttgttcttgctaaaacgcataaattacaagagcgagattcagaaaaagcgtatttagatattccaaatgcttggaaattaaatccattagaattgtctcgtttaagaattttggcacagtggcgacaaaacgtggcaatagaacgtgatttagcactttcttatattgtgaaatcagaacatctttggaaagtggcaaagaataatccacgtaatacatctgaaatgttagaaatgggattaactgaaaatgaagtacgtgtacgtggtaaaaagattttgcaattacttgctcaagcaagacgtgtttcttctaatgactatccaaaacctattgaacgtatttctgaagatcctcgttataaaaaaacaattcgattattacaagaaaaagtgaatagcttaacaccaaaaggtttaacccctgaaatcgttgcaagtaaacgtactttggaagaattaattaaatgggtttggaaatatgattgttctcaagataaactaccagagttgctgattggatggcgaaaacctattggtgaaaagttagttgatgtacttaagtag

SEQ ID NO: 768 - protein, 380 aa, Haemophilus influenzae
MIKECQNPPHFRVISDNAALLEVCNLAQMKSAVALDTEFMRVSTYFPKLGLIQLYDGERVSLIDPLAITDFSPFVALLANPKVLKILHSCSEDLLVFLQEFDQLPRPMIDTQIIARFLGLGTSAGLAKLAQQYLNVEIDKGATRTNWIKRPLSDIQLQYAAGDVWYLLPLYHILEKELAKTPWEQAVRDDCELVLAKTHKLQERDSEKAYLDIPNAWKLNPLELSRLRILAQWRQNVAIERDLALSYIVKSEHLWKVAKNNPRNTSEMLEMGLTENEVRVRGKKILQLLAQARRVSSNDYPKPIERISEDPRYKKTIRLLQEKVNSLTPKGLTPEIVASKRTLEELIKWVWKYDCSQDKLPELLIGWRKPIGEKLVDVLK

SEQ ID NO: 769 - DNA, 1896 bp, Haemophilus influenzae
atgtcatctattaaatatcgtccagaaattgatggactacgtgcaattgctgttatttcagtcattatttatcatcttaatgaaaactggttatctggtggttttcttggggtggatattttctttgttatttctggttttctgattactggtattattatcacagaaattcaacagaattctttttcgtttaaacaattttatactcgacgtattaaacgaatttatcctgcttttattacagcaatggcattagtgtctttcattgcgtctgttattttcatttataatgattttaatcaattaagaaaaaccattgaattagctacagctttcttatctaatttctatttaggtttaacacaaggttattttgatttaagcgccaatgaaaatcctgtgttacatatttggtcattagctgtagaagaacaatactatcttatttttccacttatcctaattttagcttataaaaaatttagagaaattaaagtattatttattataacgctaatcttgttttttattttacttgctacctcttttattccagctaatttttacaaagaagtattgcatcagcctaatatttattatctctctaacctaagatttcctgaattacttgtaggatctttgttggcaatttatcataatctttcagcaagcaagcaagcaagcaagcaagcaagcaagcaagcaagcaatgttattgcaatattaagtacattactattatttttctgcttatttttaatgaataataatattgcatatattccgggtattactttaattcttccttgtatttttacagcattaattattcataccacatcacaaaataacatcgttaaattatgtttatctaataaagcaatagtgtttattggaaaaatttcttattctctttatttatatcattggatttttattgcgtttgcttattacattactggcagcaagcagattcaaggcattacagttttaattgttgttatattaactattattttttctatcacaagttattatttaattgagcaacctataagaaaatcaaaattaaactttaaacaggcatttatctatctttatctaattccatctctttttattattggttataacacttatgaaagaaaacagattagaaaagaaaaagaacatattgaacaagatgttttatctgttaatttagagaataacttcccaactacagttttaacaataggggattctcatgctggtcatcttacttattttttaaaatatcttggtaagcaagaaggatggaagtcaactattttaagcataactgatgggaaggattgttttgttttagtggataaaaacaataaaataacacctgagtgtcaagggttacttgatgagattaattcacctaaatataaagctatttttatttctggattttatgatttaagaatgggaggacaacctgttccccgatttaacgctcaggcttcctttattgataacttcaaaactcgctttgttgaaactgtaaaattactggctaaatcaaaatcagtttatatctttgcaaataacagttctattagtagatctcctgttcgaggatatttactagaaaaatatggccttgaaaaatatttggaaccaattcgtagaatgggcgatattgatgcgagtaacaaaattatttatgatttagtcaaagatattcctaatgtttattgggtagatgctcaacagtatttaccaaaagatagcgttatggcagaaggaaaatacttgtatggggatcaagatcacttaacaaattttggtgcttactatatggcaaaagaatttagtaaataccaacgagtgatgacacctgaacaagtgaaaaaactctacgagtaa

SEQ ID NO: 770 - protein, 631 aa, Haemophilus influenzae
MSSIKYRPEIDGLRAIAVISVIIYHLNENWLSGGFLGVDIFFVISGFLITGIIITEIQQNSFSFKQFYTRRIKRIYPAFITAMALVSFIASVIFIYNDFNQLRKTIELATAFLSNFYLGLTQGYFDLSANENPVLHIWSLAVEEQYYLIFPLILILAYKKFREIKVLFIITLILFFILLATSFIPANFYKEVLHQPNIYYLSNLRFPELLVGSLLAIYHNLSASKQASKQASKQASNVIAILSTLLLFFCLFLMNNNIAYIPGITLILPCIFTALIIHTTSQNNIVKLCLSNKAIVFIGKISYSLYLYHWIFIAFAYYITGSKQIQGITVLIVVILTIIFSITSYYLIEQPIRKSKLNFKQAFIYLYLIPSLFIIGYNTYERKQIRKEKEHIEQDVLSVNLENNFPTTVLTIGDSHAGHLTYFLKYLGKQEGWKSTILSITDGKDCFVLVDKNNKITPECQGLLDEINSPKYKAIFISGFYDLRMGGQPVPRFNAQASFIDNFKTRFVETVKLLAKSKSVYIFANNSSISRSPVRGYLLEKYGLEKYLEPIRRMGDIDASNKIIYDLVKDIPNVYWVDAQQYLPKDSVMAEGKYLYGDQDHLTNFGAYYMAKEFSKYQRVMTPEQVKKLYE

SEQ ID NO: 771 - DNA, 1092 bp, Haemophilus influenzae
atgggattcaaatgtggtattgtgggattgccaaatgtcggcaaatctactctttttaacgcactcactaaagctggcattgaagccgcaaactatccattctgtactatcgaaccaaatacgggtgtcgtgccaatgccagatccacgtttagacgcattggcagaaatcgttaagcctgaacgcatattacctaccacgatggaattcgtggacatcgcaggcttagttgcaggtgctagcaaaggcgagggcttgggtaataaattcctcgctaatattcgtgaaaccgatgcaattggtcacgtagtgcgttgttttgaaaacgatgacattgtacacgttgcagggaaaattgatccgcttgatgatattgaaactatcaacactgaattagccttagcagacttagacagctgtgaacgagcaatccaacgtttacaaaaacgtgccaaaggtggcgataaggaagctaaatttgaactttccgttatggaaaaaatccttcctgtgctggaaaatgcaggaatgattcgttctgttgggttagataaagaagaattgcaagcaatcaagagttacaacttcttaacgttaaaaccaacaatgtatatcgcaaacgtaaatgaagatggctttgaaaataacccatatttagatcgcgttcgtgaaattgctgcaaaagaaggggcggtagttgttccagtatgtgcggcgattgaatctgaaattgcagaacttgatgatgaagaaaaagtcgagtttttacaagatttaggcattgaagaaccgggattgaaccgtgtaattcgtgcaggatatgcgcttttaaatcttcaaacttatttcactgctggcgtaaaagaagtacgagcttggacagtttcagtcggcgcaaccgcaccaaaagcagcagccgtaatccacaccgactttgaaaaaggctttatccgagcagaagttattgcttatgaagactttatccaattcaacggcgaaaacggtgcaaaagaagcaggtaaatggcgtttagaaggtaaagattacatcgtacaagatggcgatgtcatgcacttccgattcaatgtataa

SEQ ID NO: 772 - protein, 363 aa, Haemophilus influenzae
MGFKCGIVGLPNVGKSTLFNALTKAGIEAANYPFCTIEPNTGVVPMPDPRLDALAEIVKPERILPTTMEFVDIAGLVAGASKGEGLGNKFLANIRETDAIGHVVRCFENDDIVHVAGKIDPLDDIETINTELALADLDSCERAIQRLQKRAKGGDKEAKFELSVMEKILPVLENAGMIRSVGLDKEELQAIKSYNFLTLKPTMYIANVNEDGFENNPYLDRVREIAAKEGAVVVPVCAAIESEIAELDDEEKVEFLQDLGIEEPGLNRVIRAGYALLNLQTYFTAGVKEVRAWTVSVGATAPKAAAVIHTDFEKGFIRAEVIAYEDFIQFNGENGAKEAGKWRLEGKDYIVQDGDVMHFRFNV

SEQ ID NO: 773 - DNA, 585 bp, Haemophilus influenzae
atgtcagaaataaaactcattgttggtttaggcaatcctggcgataaatataccgatacacgccataatgcaggcgaatggcttattgaacgcttggcacgtcgttttaacgtttcgctaaatccagaaagtaaattcttcggaaaaactgcccgcactttagtgaatggaaaagaagtacgccttttagtgccagcaacttttatgaatttaagcggtaaagcagttggtgcgttggcaagtttttaccgtattaaacctgaagaaattttggttattcacgatgaactagatttgcctgctggcacagcgaaactcaaacaaggcggtggacatggcggacataacggcttaaaagatattgtggcacaactaggcaataacaataatttctaccgtttacgcattggcattgggcatccaggtcatcgtgatttagtggcaggttatgttttaaataaaccatctccagcagatcgcaatgcacttgaaaaagtgttagatgaggcaactgattgtgtagaaatgattttcaaagatggaatggtcaaagcgaccaatcgtttaaacagttttaaaatttaa

SEQ ID NO: 774 - protein, 194 aa, Haemophilus influenzae
MSEIKLIVGLGNPGDKYTDTRHNAGEWLIERLARRFNVSLNPESKFFGKTARTLVNGKEVRLLVPATFMNLSGKAVGALASFYRIKPEEILVIHDELDLPAGTAKLKQGGGHGGHNGLKDIVAQLGNNNNFYRLRIGIGHPGHRDLVAGYVLNKPSPADRNALEKVLDEATDCVEMIFKDGMVKATNRLNSFKI

SEQ ID NO: 775 - DNA, 309 bp, Haemophilus influenzae
atgaatcagattaacattgaaatcgcttatgcttttcccgaacgttattatttgaaatcttttcaagttgatgaaggtatttccgtgcaaacggcgattatgcaatcagggattttaagccaatttccagagattgatttgagcacaaataaaattgggattttcagtcgtccaataaaattgactgatgtattaaaagagggcgatcgtattgaaatttatcgtccattacttgctgatccgaaagaaattcgccgtaagcgtgcagcagagcaagctgcagccaaagacaaagaaaaaggagcttaa

SEQ ID NO: 776 - protein, 102 aa, Haemophilus influenzae
MNQINIEIAYAFPERYYLKSFQVDEGISVQTAIMQSGILSQFPEIDLSTNKIGIFSRPIKLTDVLKEGDRIEIYRPLLADPKEIRRKRAAEQAAAKDKEKGA

SEQ ID NO: 777 - DNA, 1215 bp, Haemophilus influenzae
atgaccgcactttcatccgttgatttttgtttacctgaacatatcacgccagaaatttttctacgtgattattggcagaaaaagccacttgtgattcgtaacggtttgcctgaaattgttgggcagtttgagccacaagatattattgaacttgcacaaaatgaagatgttaccgctcgtttagtgaagacattttctgatgataattggaaagttttttttagccctttgagcgacaaggattttcaaaagttaccagaaaaatggtctgtgttagttcaaaatttggagcaatggtcgcctgaattagggcaactttggaacaaatttggctttattcctcaatggcaacgtgacgacattatggtgtcttacgcgccgaaaggtggctctgttggtaagcattatgatgaatatgatgtatttttagtgcaaggatatggccatcgtcgttggcaagtgggtaaatggtgcgatgcaagcactgaatttaaaccaaatcaatcgatccgaatttttgatgatatgggcgaattagtcattgatgaagtaatgaatccaggcgatattttgtatattccagcccgtatggcacattatggcgtggctgaagatgattgtttaaccttttcttttggtttgcgttatccaaatttaagtaatttgattgatagcgtaagcaaaagtttctgtcatcaagatccagatttgaatttaagcgaatttgatttaccgctacgtttaagccagtctgaacaacgtacaggtaaacttgcagatgaaaatattcaagcaatgaaacagcttttattagataaattggctaattcaaaagcttttgatacgttatttaaacaagccgtagcaagtgcggtaagttctcgtcgttatgagttattggtttctgatgaaatgtgcgatcccgatgaagtgcggtcaattttagaagaagatggcgcattcctttctcaagacaacaattgtaaattgctttacaccgaaaatccgttgcgaatttatgcgaacggcgaatggttagatgaacttaatataattgagagcgaagtattaaaacgcttgtctgatggcgaaagtttagattgggtatttctatctaatttagtgaatgaaaccgaagatcccgaaacttcaatggatttactgttggattccatttgtaactgggttgatgatgggtgggcgttaattgaataa

SEQ ID NO: 778 - protein, 404 aa, Haemophilus influenzae
MTALSSVDFCLPEHITPEIFLRDYWQKKPLVIRNGLPEIVGQFEPQDIIELAQNEDVTARLVKTFSDDNWKVFFSPLSDKDFQKLPEKWSVLVQNLEQWSPELGQLWNKFGFIPQWQRDDIMVSYAPKGGSVGKHYDEYDVFLVQGYGHRRWQVGKWCDASTEFKPNQSIRIFDDMGELVIDEVMNPGDILYIPARMAHYGVAEDDCLTFSFGLRYPNLSNLIDSVSKSFCHQDPDLNLSEFDLPLRLSQSEQRTGKLADENIQAMKQLLLDKLANSKAFDTLFKQAVASAVSSRRYELLVSDEMCDPDEVRSILEEDGAFLSQDNNCKLLYTENPLRIYANGEWLDELNIIESEVLKRLSDGESLDWVFLSNLVNETEDPETSMDLLLDSICNWVDDGWALIE

SEQ ID NO: 779 - DNA, 1320 bp, Haemophilus influenzae
atgtcagacaatatttattccgtctctcaactgaattctgccgcacgtcagatgcttgagggtaatttttgccaaatttggctaacgggggaaatttccaattttacccaacctgtgtctgggcattggtatttaacgctgaaagatgaaaatgcacaggtgcgttgtgcaatgtttcgtatgaaaaatttgcgtgttgcttttcgtccacaaaatggaatgcaagtgcttgtgcgtgccaatgtgagtttatatgagcctcgcggcgattatcaacttattattgattcgatgcacccagcaggcgagggattattgcaacagcaatttgaagcgttaaaaatgaaattggctgcggaaggattgtttgctcaaaatcttaagaaaaatctaccgcactttagtaaagcagtggggattattacgtcttctacaggtgcggcattgcaagatattttgcatattttggcacgccgtgatccaagtttaaaagtcgttatttatcccactgcagttcaaggcaaagaggcgactgcagaaattgtgcaaatgattgaacttgctaatgtgcgacaagaagtagatgtattaattgtgggtcgtggtggtggttcattagaagatctttggtgttttaatgaagaagaagtggcgcgagcgatttttcgttcaaccttacccattatcagtgcggtgggacacgaaacagatgtgacgattgccgattttgtggcagatcttcgtgcgccgaccccttctgcagcggcagagttagttagtcgtaatcaagatgaattattgcaacaacttcgccatcaacagcaacgtttagatatggcatttgatcgtttatttacacgaaaaagccagcgtttgaaacagcttgccttacgattgcaaaatcaacatccacagaatcagctacgcgctcaacaagcgaaaaatgaacagcttacacatcgcttgcaacttgcaatattgcgtcagtttgaaaatacacaacaaaaattcaccgcactttcttctcgtttaaaacaaaatccattgccatatcgcatacaacgtcatcaacagcatttagaacaacttcaagtgcggttaaatttttgcgtaaatcgccaagtgacggaacgtcaaaataaactggcaacattatgcggaaaactggatggcttaagcccattgaaagtcttggcgagaggttattccattgtggaaaatccgcaaggtaaagccattgttagcgtgaaagatgtcaatcaaggggacttcattacaactcaagtggctgatggaaaaattgtgagtaaggttttgtaa

SEQ ID NO: 780 - protein, 439 aa, Haemophilus influenzae
MSDNIYSVSQLNSAARQMLEGNFCQIWLTGEISNFTQPVSGHWYLTLKDENAQVRCAMFRMKNLRVAFRPQNGMQVLVRANVSLYEPRGDYQLIIDSMHPAGEGLLQQQFEALKMKLAAEGLFAQNLKKNLPHFSKAVGIITSSTGAALQDILHILARRDPSLKVVIYPTAVQGKEATAEIVQMIELANVRQEVDVLIVGRGGGSLEDLWCFNEEEVARAIFRSTLPIISAVGHETDVTIADFVADLRAPTPSAAAELVSRNQDELLQQLRHQQQRLDMAFDRLFTRKSQRLKQLALRLQNQHPQNQLRAQQAKNEQLTHRLQLAILRQFENTQQKFTALSSRLKQNPLPYRIQRHQQHLEQLQVRLNFCVNRQVTERQNKLATLCGKLDGLSPLKVLARGYSIVENPQGKAIVSVKDVNQGDFITTQVADGKIVSKVL

SEQ ID NO: 781 - DNA, 633 bp, Haemophilus influenzae
atgtcagaaattcaacattttagccaacaagatatagaaatattgggcgaacaaactttgtatgaaggttttttcacgcttaaacgaatccaatttaaacataaactttttgctgggggacaaagtggcgtcgtaacccgagaattactgattaaaggtgccgcctcagcggttatcgcttatgatccaaaagaagattcggtgattttagttgaacaagttcgtattggcgcggcttatcatccagaatctagccgttcgccttggttactcgaattaattgcaggtatggtggaaaaaggcgaaaagccagaagaagttgctttgcgtgagagtgaagaagaagcagggattcaagtcaaaaatttaacacattgtttaagtgtgtgggatagccccggtggcatagtggagcggattcatttatttgcaggcgaagtggatagcacacaagcaaaaggcattcacggtttggctgaagaaaatgaagacattcgagtgcacgtagtaaaacgtgaacaggcgtatcaatggatgtgcgaggggaaaattgataatggcattgcagtgattggattgcagtggcttcaattaaattatgctcagttacaacaaagttggaaacgtagttag

SEQ ID NO: 782 - protein, 210 aa, Haemophilus influenzae
MSEIQHFSQQDIEILGEQTLYEGFFTLKRIQFKHKLFAGGQSGVVTRELLIKGAASAVIAYDPKEDSVILVEQVRIGAAYHPESSRSPWLLELIAGMVEKGEKPEEVALRESEEEAGIQVKNLTHCLSVWDSPGGIVERIHLFAGEVDSTQAKGIHGLAEENEDIRVHVVKREQAYQWMCEGKIDNGIAVIGLQWLQLNYAQLQQSWKRS

SEQ ID NO: 783 - DNA, 825 bp, Haemophilus influenzae
atgaaaaatacgtttgtttatcaggcggaaaagcctgttataaagttattacaaattacggatccccatttatttaaagatgaaagtgcggaattattgggggtaaatacacaagcaagttttgctcaagtattaaaggaaattcagcaagaaaataacgaatttgatgtgattcttgctacaggcgatcttgtgcaggatagtagcgatgaaggttacattcgttttgtagaaatgatgaaacctttcaataaacctgtgttttggattccaggaaatcacgattttcagcctaaaatggcagaatttttaaatcagccaccaatgaacgtggcaaaacatcttctattaggcgaacattggcaagccttattgttggatagccaagtttacggtgtaccacatgggcaactaagccagcatcaacttgatttattaaaagaaaccttaggaaaaaatccagaacgctataccttggttgtattacaccatcatttattaccaactaattccgcgtggcttgatcaacataaccttcgtaattctcatgaattggcagaagtgcttgcacctttttccaatgtgaaagctattttatatgggcatattcatcaagaagtaaatagtgaatggaatggttatcaagtgatggcaacaccagcgacttgtattcaatttaaacctgattgccagtatttttctcttgataccttacagcctggttggcgtgaaattgagctacattcagatggttcaattcgtacccaagtgaaacgtattcagcaagcggaatttttaccgaatatgcaagaagatggatattaa

SEQ ID NO: 784 - protein, 274 aa, Haemophilus influenzae
MKNTFVYQAEKPVIKLLQITDPHLFKDESAELLGVNTQASFAQVLKEIQQENNEFDVILATGDLVQDSSDEGYIRFVEMMKPFNKPVFWIPGNHDFQPKMAEFLNQPPMNVAKHLLLGEHWQALLLDSQVYGVPHGQLSQHQLDLLKETLGKNPERYTLVVLHHHLLPTNSAWLDQHNLRNSHELAEVLAPFSNVKAILYGHIHQEVNSEWNGYQVMATPATCIQFKPDCQYFSLDTLQPGWREIELHSDGSIRTQVKRIQQAEFLPNMQEDGY

SEQ ID NO: 785 - DNA, 288 bp, Haemophilus influenzae
atgaccgtaaaatgcaaagcagaagaatccttaacttgcagctgtgttgatgtaggcactattattgatggctctgactgtagcgtagaagtacatcaattttatagcactgaagctgatgccaatgcagcgcttgaacgattaacgaagaaagcgcgcgatatagaaagcgatccttgcgaaattaaaagcgaaatcgtggcagttgaaaacggcgttcaattaaatgcctctttcacttttagttgccaagcagaagcgatgatttttgaactggcgaatcgttaa

SEQ ID NO: 786 - protein, 95 aa, Haemophilus influenzae
MTVKCKAEESLTCSCVDVGTIIDGSDCSVEVHQFYSTEADANAALERLTKKARDIESDPCEIKSEIVAVENGVQLNASFTFSCQAEAMIFELANR

SEQ ID NO: 787 - DNA, 1380 bp, Haemophilus influenzae
atgaaaaaatttaatcaatctctattagcaactgcaatgttgttggctgcaggtggtgcaaatgcggcagcgtttcaattggcggaagtttctacttcaggtcttggtcgtgcctatgcgggtgaagcggcgattgcagataatgcttctgtcgtggcaactaacccagctttgatgagtttatttaaaacggcacagttttccacaggtggcgtttatattgattctagaattaatatgaatggtgatgtaacttcttatgctcagataataacaaatcagattggaatgaaagcaataaaggacggctcagcttcacagcgtaatgttgttcccggtgcttttgtgccaaatctttatttcgttgcgccagtgaatgataaattcgcgctgggtgctggaatgaatgtcaatttcggtctaaaaagtgaatatgacgatagttatgatgctggtgtatttggtggaaaaactgacttgagtgctatcaacttaaatttaagtggtgcttatcgagtaacagaaggtttgagcctaggtttaggggtaaatgcggtttatgctaaagcccaagttgaacggaatgctggtcttattgcggatagtgttaaggataaccaaataacaagcgcactctcaacacagcaagaaccattcagagatcttaagaagtatttgccctctaaggacaaatctgttgtgtcattacaagatagagccgcttggggctttggctggaatgcaggtgtaatgtatcaatttaatgaagctaacagaattggtttagcctatcattctaaagtggacattgattttgctgaccgcactgctactagtttagaagcaaatgtcatcaaagaaggtaaaaaaggtaatttaacctttacattgccagattacttagaactttctggtttccatcaattaactgacaaacttgcagtgcattatagttataaatatacccattggagtcgtttaacaaaattacatgccagcttcgaagatggtaaaaaagcttttgataaagaattacaatacagtaataactctcgtgttgcattaggggcaagttataatctttatgaaaaattgaccttacgtgcgggtattgcttacgatcaagcggcatctcgtcatcaccgtagtgctgcaattccagataccgatcgcacttggtatagtttaggtgcaacctataaattcacgccgaatttatctgttgatcttggctatgcttacttaaaaggcaaaaaagttcactttaaagaagtaaaaacaataggtgacaaacgtacattgacattgaatacaactgcaaattatacttctcaagcacacgcaaatctttacggtttgaatttaaattatagtttctaa

SEQ ID NO: 788 - protein, 459 aa, Haemophilus influenzae
MKKFNQSLLATAMLLAAGGANAAAFQLAEVSTSGLGRAYAGEAAIADNASVVATNPALMSLFKTAQFSTGGVYIDSRINMNGDVTSYAQIITNQIGMKAIKDGSASQRNVVPGAFVPNLYFVAPVNDKFALGAGMNVNFGLKSEYDDSYDAGVFGGKTDLSAINLNLSGAYRVTEGLSLGLGVNAVYAKAQVERNAGLIADSVKDNQITSALSTQQEPFRDLKKYLPSKDKSVVSLQDRAAWGFGWNAGVMYQFNEANRIGLAYHSKVDIDFADRTATSLEANVIKEGKKGNLTFTLPDYLELSGFHQLTDKLAVHYSYKYTHWSRLTKLHASFEDGKKAFDKELQYSNNSRVALGASYNLYEKLTLRAGIAYDQAASRHHRSAAIPDTDRTWYSLGATYKFTPNLSVDLGYAYLKGKKVHFKEVKTIGDKRTLTLNTTANYTSQAHANLYGLNLNYSF

SEQ ID NO: 789 - DNA, 540 bp, Haemophilus influenzae
atgaccgcactttattacacttattacccctcgccagtcggacggcttttgattttatctgacggcgaaagcattacacatattgattttgaaaaagagcaatatgcgcctaatccaaaatggcacaagcaagatgaattgcctgtttttcaaaaagtgcggttggcttttgaacgatattttaatggcgaagttgagtgtttttcaaacattcccttaaaaccagaaggcaccacgtttcaacaagcaatttggcaagccttgcgaaaaattgattatggcgagctttcaagttatggagagctggcgttacggattaataatcctaaagctgttcgtgccgtgggcggtgcggtagggagtaatccgattagtattattattccttgtcaccgcattttaggcaaagatcggactttaactggttttggtggtggcttagaggcaaaacgttttttattgcagttagaaaaaattccctatattgataaaggcactgaaaatactaagcctcgcttttttaagaaatatcacgaatga

SEQ ID NO: 790 - protein, 179 aa, Haemophilus influenzae
MTALYYTYYPSPVGRLLILSDGESITHIDFEKEQYAPNPKWHKQDELPVFQKVRLAFERYFNGEVECFSNIPLKPEGTTFQQAIWQALRKIDYGELSSYGELALRINNPKAVRAVGGAVGSNPISIIIPCHRILGKDRTLTGFGGGLEAKRFLLQLEKIPYIDKGTENTKPRFFKKYHE

SEQ ID NO: 791 - DNA, 672 bp, Haemophilus influenzae
atgattccacaaacccttgaacaattactttcccaagcgcaatcaattgcaggcttaacttttggggagttagctgatgaactgcatattcctgtcccgattgatttaaaacgtgataaaggctgggtggggatgttattagagcgtgctttaggcgcaacggcaggaagtaaagctgaacaggatttttctcatttaggcgttgagcttaaaacgttaccgattaatgcggagggttatcctcttgaaaccacctttgtgagccttgccccattggtacaaaattcaggagttaaatgggaaaattctcacgttcgtcataaactttcttgtgtactttggatgccgattgaaggcagccgccatattccattacgtgaacgccatatcggcgcgccaattttctggaagccaaccactgggcaagaacgtcaattaaaacaagattgggaagaattgatggatttaattgtacttggcaaattggagcaaattaccgctcgaatcggggaagttatgcaacttcgcccgaagggtgtaaatagtcgcgcagtgacaaaaggcataggaaaaaatggcgaaattatagataccttgcctttaggtttttatctaagaaaagaattcaccgctcaaattctgaacgcatttttagaaacaaagtcgctttaa

SEQ ID NO: 792 - protein, 223 aa, Haemophilus influenzae
MIPQTLEQLLSQAQSIAGLTFGELADELHIPVPIDLKRDKGWVGMLLERALGATAGSKAEQDFSHLGVELKTLPINAEGYPLETTFVSLAPLVQNSGVKWENSHVRHKLSCVLWMPIEGSRHIPLRERHIGAPIFWKPTTGQERQLKQDWEELMDLIVLGKLEQITARIGEVMQLRPKGVNSRAVTKGIGKNGEIIDTLPLGFYLRKEFTAQILNAFLETKSL

SEQ ID NO: 793 - DNA, 1293 bp, Haemophilus influenzae
atggacttactttcagaaattgaaaaacaactcaaaaaagccaccgctcaagcatttcttatcgccttgagtggtggtttggattccactgtacttctttctttatttgcaaaacttcgtcaaaaacaaccgcacttaccgcctttatcagtacgagcaatccatattcatcacggattaagccccaatgcagacagttgggctaaacattgccaagacttatgcgatcaatttcaaattccgttgattatcgagcgagtacaagtagataaaactaatggtattgaggctggcgcacgtgaagcacgctatcaagccataaaaaaatatcttcaaacacaagaaatgctggtcacagcgcatcatctaaacgatcaaactgaaacctttttcttagccctaaaacgtggcagtgggctacaaggcttaggtgcaatgcaacaacaaagtgtattgttcggcatgccaattttacgccctttgttaggctttactcgcacccagttagaaaattacgcgcaaaaagaaaatctcaactggattacagacgaaagtaatgaagataatcgatacgatcgtaatttcttacgcaatgaaattttgccagaattacgtgaacgctgggcttattttgatttagccgtgcaacgttcagcacaacattgttttgagcaacaacagctaattaatgatttattgagtgaaacctttgcacaacattgtcaaataaaaaaccaatttaaactgtgccagttccgcaaatattctctcgcaaaacaaaccgcacttttgcgtatgtggcttgctgaaaaccaacttgaaatgccaagtaaacgccagcttacacagcttattaatgatgttgtttttgcaaaagaagaggcaaatcctcaatttcagcttgtaaataaagttattcgacgttatcaagatagtttatatttaactaagccgttttctgatctaaccaaatgcaccctaaaattagaacaaaatacgctaaatttacccgatgatttaggcaatctcactgttcaagaaaatgaacataatctgattttctactggcaggattactctgttacgctggaaaaaacgaacttgcctatttctattcgttttggctattcgggcaaagtgaaacatcatccgaaacgcccaagagaagatataaaaaaaatctggcaagaattaagcgtaccaccttgggaacgaaatcggattcctttaattttttatggtaatgagctaaaaagtgcggtaggttttttccgtgtttttaaagagtcttaa

SEQ ID NO: 794 - protein, 430 aa, Haemophilus influenzae
MDLLSEIEKQLKKATAQAFLIALSGGLDSTVLLSLFAKLRQKQPHLPPLSVRAIHIHHGLSPNADSWAKHCQDLCDQFQIPLIIERVQVDKTNGIEAGAREARYQAIKKYLQTQEMLVTAHHLNDQTETFFLALKRGSGLQGLGAMQQQSVLFGMPILRPLLGFTRTQLENYAQKENLNWITDESNEDNRYDRNFLRNEILPELRERWAYFDLAVQRSAQHCFEQQQLINDLLSETFAQHCQIKNQFKLCQFRKYSLAKQTALLRMWLAENQLEMPSKRQLTQLINDVVFAKEEANPQFQLVNKVIRRYQDSLYLTKPFSDLTKCTLKLEQNTLNLPDDLGNLTVQENEHNLIFYWQDYSVTLEKTNLPISIRFGYSGKVKHHPKRPREDIKKIWQELSVPPWERNRIPLIFYGNELKSAVGFFRVFKES

SEQ ID NO: 795 - DNA, 867 bp, Haemophilus influenzae
atgaaaaacgtactttcgatccaatcccacgtggtctatggttttgcaggtaacaaatccgcaacttttccaatgcagttattaggcgtcgatgtatgggcattaaataccgtgcaattttctaatcacacccaatacggaaaatggacgggcatggtaatcccacaagaacaaatccgagaaattgtagctggacttgataacattgaaaaactacaagaatgtgatgccttgttatctggttacttaggttctgcggaacaagtcgatcaaattctttttgctttagagcaaatcaaactgcgtaatccaaatgcgctttatttatgcgaccctgtaatgccacatccgaaaaaaagctgcgtggttgccaatggtgtttgcgaagcacttattgaaaaagcgattccagtggcagacattatgacgccaaacttgcacgaattgcgtcagctcactgaattcccaattaatacctttgacgatgtattaaaagcagtgaatgcgttaattgcaaaaggcgtgaagaaagttctcgttaaacatttaggtagtgcgggtaaaattaacgatcctgatacatttgaaattattatggcaaccccagagggtgtttggcatttaagccgtccactttatcaattcaactttgaaccagtgggcgtgggcgatttaatcgcagggacattcttagcaaatttactcaatggaaaatctgatgtagaagcctttgaagcgatgaataatgaagtagcaggcgtaatgaaaaccacctttgaactaggttcttacgaattacaaaccattgccgcacgttttgaaattctcaatccaagcagcaattataaagctgaaaaagttgcctaa

SEQ ID NO: 796 - protein, 288 aa, Haemophilus influenzae
MKNVLSIQSHVVYGFAGNKSATFPMQLLGVDVWALNTVQFSNHTQYGKWTGMVIPQEQIREIVAGLDNIEKLQECDALLSGYLGSAEQVDQILFALEQIKLRNPNALYLCDPVMPHPKKSCVVANGVCEALIEKAIPVADIMTPNLHELRQLTEFPINTFDDVLKAVNALIAKGVKKVLVKHLGSAGKINDPDTFEIIMATPEGVWHLSRPLYQFNFEPVGVGDLIAGTFLANLLNGKSDVEAFEAMNNEVAGVMKTTFELGSYELQTIAARFEILNPSSNYKAEKVA

SEQ ID NO: 797 - DNA, 948 bp, Haemophilus influenzae
atgaaccaagaatatttagattttgaattgccgattgccgaattagaagcaaaaattgaagcattatgctcagcatcggatgataaagttgatttaactgatgaaatcaaacgcttacaaaagaaaagtaacgaactcactaaaaaaacctttgctaaccttgatgcttggcaagtttcacgtatggcgcgtcatccaaaccgcccttatacattagattatatcgaacatatttttacggaatttgaagaacttgctggcgatcgtgcttttgctgatgataaagcgattgttggtggcttggcacgtttagatggtcgcccagtgatggtaattggtcatcaaaaaggccgtactgtaaaagataaagtgagtcgtaattttggtatgcctgcacctgaaggctatcgcaaagcgttacgtttaatggaaatggctgaacgttttaaattgccaattattacatttattgacacaccaggggcttatccaggtattggcgcagaagaacgtggtcaagcggaagctattgctcgcaacttacgagaaatggcacaacttaccgttcccgttatttgtaccgttatcggtgaaggcggttcgggtggtgcattagctattggcgtgggcgataaagtgaatatgttgcagtattccacttattctgttatctcgcctgaaggttgcgcttctattctttggaaaagtgcggaaaaagcatcgactgcagcggaagtaatgggattaaccgcaagccgtttaaaagaattaaatcttatcgatggcattgtgcaagaacctttaggtggtgcacatcgtaattatctagaaatagctgaaaacttaaaacttcgtttaaaagaagatttagcagaacttgacggactaagcaaagaagaattattaaatagacgctatgaacgtttaatgtcttacggttattgctaa

SEQ ID NO: 798 - protein, 315 aa, Haemophilus influenzae
MNQEYLDFELPIAELEAKIEALCSASDDKVDLTDEIKRLQKKSNELTKKTFANLDAWQVSRMARHPNRPYTLDYIEHIFTEFEELAGDRAFADDKAIVGGLARLDGRPVMVIGHQKGRTVKDKVSRNFGMPAPEGYRKALRLMEMAERFKLPIITFIDTPGAYPGIGAEERGQAEAIARNLREMAQLTVPVICTVIGEGGSGGALAIGVGDKVNMLQYSTYSVISPEGCASILWKSAEKASTAAEVMGLTASRLKELNLIDGIVQEPLGGAHRNYLEIAENLKLRLKEDLAELDGLSKEELLNRRYERLMSYGYC

SEQ ID NO: 799 - DNA, 786 bp, Haemophilus influenzae
atgtttgaaattttatttccagcctttttaacaggcattttgctttcacttattactgcgccacttggcgtatttgtagtgtggcagaaaatggcttattttggcgacacactttctcactctgccttgctcggcgtagcgttagggattttcttacaagtcaatccttacattgcgattgtggtgctgaccttaattcttgctatcgcaatggtgtggttagaaagcaacacgcaattttctattgataccttgctcggtattatcgctcatagttgtttatctctcggcgttgtgacagtaggattattacggaatgtacgggtagatttaatgaattatttatttggggatttgctcgcaattaattataccgatttaatttatattggcattggcgtgataattgtgctttcaacattaatttacttttggcaatccttactttccaccaccgtatcgccagaactcgcgcaagttgaaggcattaatatcaaaaaaatgcgttttattttaatgatattaaccgcattgactattgccttgagtatgaaatttgtcggtgcattaataatcacatccttattaatcatccctgcggcaaccgctcgtcgctttgcgagaacgccagaatctatggtgggctgggcaattgtagtcagtatgttgtcaattataggtgggctaatcttatcagccttttatgataccgctgctgggccttccgttgtgatttgttcagcgtttttatttgtcttatcactcttcaaaaaagagcgattatga

SEQ ID NO: 800 - protein, 261 aa, Haemophilus influenzae
MFEILFPAFLTGILLSLITAPLGVFVVWQKMAYFGDTLSHSALLGVALGIFLQVNPYIAIVVLTLILAIAMVWLESNTQFSIDTLLGIIAHSCLSLGVVTVGLLRNVRVDLMNYLFGDLLAINYTDLIYIGIGVIIVLSTLIYFWQSLLSTTVSPELAQVEGINIKKMRFILMILTALTIALSMKFVGALIITSLLIIPAATARRFARTPESMVGWAIVVSMLSIIGGLILSAFYDTAAGPSVVICSAFLFVLSLFKKERL

SEQ ID NO: 801 - DNA, 741 bp, Haemophilus influenzae
gtggttttcgcacaaaaaaccgctctgcaagatattaatttaaatatctatccgaattctattatcactattgttggtccaaatggtggtggcaaatctacgttattaaaaaccttattaaaactacaaacgcccacttctggcgaggtcatttacagtaaaaatgttcgcattggctatgtgccacaaaaaatccatttagatcatagtttgcctattacggttgagcgatttctttcgctaaaaaaaggcattaaaacacaagaaatatccaccgcacttgagcaactttctatttcacatttacgcaaaaataatatgcaaaaactatctggtggcgaaatgcaacgggtattattggcgcgtgcaattttaaataaaccaaatttacttgtgctagacgaacccactcaaggcgtagatattactgggcaagcagagctttatcagctcattcatcaaacccaacaaaaactaaattgtgctgtattgatggtatcacacgatttacacattgtgatggcagacagtaaagaagtattgtgtattaaccaacatatttgttgtgcaggtacgcctgatgttctctcaaatgatccaacatttatgcgtttatggggaaatcagatcgcacaaaatatcggcttttatacccatcatcacaatcatcatcacactttacacggagatgtgtgcggttgtaattcatcagcagtgcattgccaaaataaggataaataa

SEQ ID NO: 802 - protein, 246 aa, Haemophilus influenzae
MVFAQKTALQDINLNIYPNSIITIVGPNGGGKSTLLKTLLKLQTPTSGEVIYSKNVRIGYVPQKIHLDHSLPITVERFLSLKKGIKTQEISTALEQLSISHLRKNNMQKLSGGEMQRVLLARAILNKPNLLVLDEPTQGVDITGQAELYQLIHQTQQKLNCAVLMVSHDLHIVMADSKEVLCINQHICCAGTPDVLSNDPTFMRLWGNQIAQNIGFYTHHHNHHHTLHGDVCGCNSSAVHCQNKDK

SEQ ID NO: 803 - DNA, 102 bp, Haemophilus influenzae
ttgaatgagcggttgttggttttgctcgttgcgaatggctgtgatattcataaaatcgccgtgttttcaacaatggttggggaaaataacgcatttttatag

SEQ ID NO: 804 - protein, 33 aa, Haemophilus influenzae
MNERLLVLLVANGCDIHKIAVFSTMVGENNAFL

SEQ ID NO: 805 - DNA, 1419 bp, Haemophilus influenzae
gtgcaacacgtaaaattagctcgagatagacgaaaaaaacgcgcatatataaaagtaggcgtgttttttgttgctattttgcttattttgacaggcattttacttacaataaaacaacctgaagaaaactccatattttccacctttgacagtggggaatatcacgagttaaatacatcgccaaatgaaaattccaccgcacttcaacctgatgaaaacgctacctcttatgatgatgagctacaagcaaaagatgacgaagttgatgaagtaaaactatcttcagatgatctcgatactttacctcaacacgcacaagacgcactcaatggtttattagacgcagccgatcaagccataagaattactaatcaatttagctatacggtaaccgaaggggataggttaaaagatgtcttagttttgtcaggtttagatgattcatcagtacaaccattgattacgcttgatcccgaattagcccacttaaaagcaggtcagcaattctactggattttagataaaaatgataacttggaatatttaaattggctggtttctgaaaaagaagaacgtatttatgaacgtctcgaagatgggaaatttaaacgccaagttattgaaaagaaaagtatttggcgaaaagaagtattaaaaggcgagattcaaaattctttaaatagtagtttaagagaaaaaggtcttgatacgcgtcaaattagccaacttagtaacgccttacaatggcaagtgagtttgagaaaactaaaaaaaggaactcaatttgccattttagtttctcgtgaatatttaggcgataaactcactggtcaaggtaatgttgaggcgttacgtatttcatctggtggtaaaaattattatgctgtgcaagctgcaaatggtcgttattataatcagcaaggagaaaccttaggcaaaggttttgctcgttatccattgcaacgccaagcacgcgtttcctccccttttaatccaaatcgtcgtcatccagtaacaggacgtattcgtccgcataaaggtgtggatttctccgtttctcaaggcacaccagttattgcaccagcagatggcacagttgaaaaagtcgcttatcaggctggcggtgcaggacgttatgttatgttgcgtcacgggcgtgaatatcaaactgtttatatgcatttgagcaaatccctagtaaaagcagggcaaacagttaaaaaaggcgaacgtattgcactttctggtaacacggggatttctacggggccgcatttacattatgaatttcatattaacggtcgagcagtgaatcctcttactgttaaattacccggtactagcagtggtatgagttcagctgaacggaaacaattccttgttcgtgttcgtgaagctgaaagaatgttaaaaccttag

SEQ ID NO: 806 - protein, 472 aa, Haemophilus influenzae
MQHVKLARDRRKKRAYIKVGVFFVAILLILTGILLTIKQPEENSIFSTFDSGEYHELNTSPNENSTALQPDENATSYDDELQAKDDEVDEVKLSSDDLDTLPQHAQDALNGLLDAADQAIRITNQFSYTVTEGDRLKDVLVLSGLDDSSVQPLITLDPELAHLKAGQQFYWILDKNDNLEYLNWLVSEKEERIYERLEDGKFKRQVIEKKSIWRKEVLKGEIQNSLNSSLREKGLDTRQISQLSNALQWQVSLRKLKKGTQFAILVSREYLGDKLTGQGNVEALRISSGGKNYYAVQAANGRYYNQQGETLGKGFARYPLQRQARVSSPFNPNRRHPVTGRIRPHKGVDFSVSQGTPVIAPADGTVEKVAYQAGGAGRYVMLRHGREYQTVYMHLSKSLVKAGQTVKKGERIALSGNTGISTGPHLHYEFHINGRAVNPLTVKLPGTSSGMSSAERKQFLVRVREAERMLKP

SEQ ID NO: 807 - DNA, 894 bp, Haemophilus influenzae
atgaaaagtgcggtagaaaacgcgaaacgttttgctatgtttgatgcgcctttgttaattcaaggcgaaacggggagtggaaaagatttgttagcgaaagcctgccattatcagagtttgcgtcgcgataaaaaatttatcgcagtaaactgtgctggtttgcctgatgaagatgcggaaagtgaaatgtttggtcgaaaagtcggagacagtgaaaccattggtttttttgagtacgctaataaagggacagttttactcgatggcattgccgaactttcattaagtttacaggctaaattattgcgttttttaacggatggatctttccgtcgagtaggcgaagaaaaagagcattatgcaaatgtgcgcgtgatttgcacatcacaggttccacttcatttgcttgttgagcaaggtaaagttcgtgctgatttatttcatcgcttaaatgttctcactattaatgtgcctgcattacgagatcgcatggctgatattgagccactggcacaaggttttttacaggaaatcagtgaagaattaaaaattgcaaaaccaactttcgataaagattttcttctttatttgcagaaatatgattggaaagggaatgttcgtgagctttataacaccctttatcgtgcttgttcgttagtacaagataatcatttaactatcgaaagtttaaatcttgctctgccacaaagtgcggtgatttctttggatgaatttgaaaataaaaccttagatgaaattattggtttctatgaagcacaagtcctaaaattattttatgctgaatatccaagcacgagaaaattggctcaacgtttaggcgtttcccatactgccattgcgaataaattgaaacaatatggaattggaaagtag

SEQ ID NO: 808 - protein, 297 aa, Haemophilus influenzae
MKSAVENAKRFAMFDAPLLIQGETGSGKDLLAKACHYQSLRRDKKFIAVNCAGLPDEDAESEMFGRKVGDSETIGFFEYANKGTVLLDGIAELSLSLQAKLLRFLTDGSFRRVGEEKEHYANVRVICTSQVPLHLLVEQGKVRADLFHRLNVLTINVPALRDRMADIEPLAQGFLQEISEELKIAKPTFDKDFLLYLQKYDWKGNVRELYNTLYRACSLVQDNHLTIESLNLALPQSAVISLDEFENKTLDEIIGFYEAQVLKLFYAEYPSTRKLAQRLGVSHTAIANKLKQYGIGK

SEQ ID NO: 809 - DNA, 276 bp, Haemophilus influenzae
atggcaaaaggacaatctttacaagatccttatttaaatgcgcttcgtcgtgaacgcattcctgtatcaatctaccttgtaaacggaatcaaacttcaaggtcaaattgaatcattcgatcaattcgtgattttattaaaaaacaccgtgaatcaaatggtatataaacacgcaatttcaacggttgtgcctgctcgttcagtttcccatcacaataacaatcatcatactgctccaacagaagcagttgaaaacgtggaaactcaagcagagtaa

SEQ ID NO: 810 - protein, 91 aa, Haemophilus influenzae
MAKGQSLQDPYLNALRRERIPVSIYLVNGIKLQGQIESFDQFVILLKNTVNQMVYKHAISTVVPARSVSHHNNNHHTAPTEAVENVETQAE

SEQ ID NO: 811 - DNA, 969 bp, Haemophilus influenzae
atgacaaaacaaaatgaaaaaatcattaattcatccgtaaaaatgctgacaattagtgaagatgaaactgggcaacgaattgataattatttattagcaaaactcaaaggtgtacccaaaagtttaatttatcgcattgtgcgtaaaggcgaagtgcgagtaaacaaaggcagaattaaaccagaatataaactgcaaacaggcgatgttgtacgcattccacctgtgcgtgtcgcagaaaaaaatgatgcgccgatttcaaaaaatctcaataaagttgccgcacttgaaaaccaaattttgtttgaagatgattgcttgattattttaaataaaccctcaggaatcgcggtgcacggcggaagtggtttaaattttggtgtgattgaagccttacgagcattacgcccagaagcacgctttttagaactggttcatcgtttagatcgcgatacatcaggcattttattaattgccaaaaaacgttcagcattacgcaatttacacgaacaacttcgcgtcaaaaccgttcaaaaagattatttagcgttagtacgtgggcaatggcaatcccatataaaagttattcaagcccctcttttgaaaaatgaattatctagcggagagcgcattgtgcgtgtcagcgagcaaggaaaaccatctgaaacccgcttcagcattgaagaacgctatataaatgctacgcttgtgaaggcttcaccagtcacagggcgaacccatcaaatccgtgtgcatacacaatatgctgggcatcctattgcattagatgataaatacggcgataaagattttgataaacaaatgaatgaattaggattaaatcgtttgtttttgcacgctttttcaattcggtttgaacaccctaaaaatggcgaaacactacgtttcaatgcgtcactagatcatcaaatgaaagcaattttgcaaaagttgcgggaaagcaaatag

SEQ ID NO: 812 - protein, 322 aa, Haemophilus influenzae
MTKQNEKIINSSVKMLTISEDETGQRIDNYLLAKLKGVPKSLIYRIVRKGEVRVNKGRIKPEYKLQTGDVVRIPPVRVAEKNDAPISKNLNKVAALENQILFEDDCLIILNKPSGIAVHGGSGLNFGVIEALRALRPEARFLELVHRLDRDTSGILLIAKKRSALRNLHEQLRVKTVQKDYLALVRGQWQSHIKVIQAPLLKNELSSGERIVRVSEQGKPSETRFSIEERYINATLVKASPVTGRTHQIRVHTQYAGHPIALDDKYGDKDFDKQMNELGLNRLFLHAFSIRFEHPKNGETLRFNASLDHQMKAILQKLRESK

SEQ ID NO: 813 - DNA, 2808 bp, Haemophilus influenzae
atgaaaagaatgttaatcaatgcgactcaaaaagaagagttgcgtgttgcgcttgtcgatggacaacgcctttttgacttggacattgaaagtccaggacacgaacaaaaaaaagcgaatatctacaaaggaaaaattactcgcgttgagccaagcttagaagcggcttttgtagattatggtgcagaacgtcacggttttttacctttaaaagaaattgcccgtgaatattttcctgatgattatgtttttcaaggtcgtccgaatattcgcgatattttgactgaaggacaggaagttatcgttcaagttaataaagaagaaagaggaaacaaaggtgcagccttaactacttttgtttctcttgctggcagttatttggtgcttatgccgaataatccacgggcaggaggaatttctcgccgtattgagggcgatgaacgtactgaactaaaagaagcattaagttcattagatgtgcctgacggtgtaggcttaatcgtccgtactgctggtgtgggaaaatcgccagaagaattacaatgggatttaaaagtattattacatcattgggaagcgatcaaacaagcttcacaaagtcgtccagctccatttttaattcatcaagaaagcgatgtgattgtacgcgctattcgtgattatttgcgtcgtgatattggtgagatcctgattgatagcccaaaaatttttgagaaagcgaaagagcatatcaaacttgtgcgtcctgatttcatcaatcgcgtgaaactttatcaaggcgaagtgccacttttcagtcactatcaaattgaatctcaaattgaatccgcattccaacgtgaagtgcgtttaccttctggcggttcaatcgttattgatgttaccgaagcattaaccgccattgatattaactccgcacgttctactcgtggtggcgatattgaagaaaccgcattaaataccaatcttgaagcggcagatgaaatcgcacgtcaattacgcttacgtgacttaggtggattagttgtcattgatttcattgatatgacaccaattcgccatcaacgtgaagtagaaaatcgtattcgtgatgcggttcgtccagatcgcgcccgtattcaaattagccgaatttctcgttttggtttgttagaaatgtcacgtcagcgtttaagcccatcattgggcgaatcttcgcaccatatttgccctcgttgtcaaggaacaggcaaagtgcgtgataatgaatctctttctttatctattttacgtttgctggaagaagaagcattaaaagaaaacaccaagcaagtgcataccattgtgccagtacaaattgcctcttatcttcttaacgaaaaacgcaaagcaatcagtaatattgaaaagcgtcataatgtcgatattattgttgccccaaatgaagcaatggaaacaccgcactttagtgttttccgtttacgtgatggcgaagaagtaaatgaattaagctataacttagcgaaaattcactgtgagaaagatgaaagcaccgaggaatctcttgtttctcgtaatgtggatacaaccgttgttgctgaacaacctgcagttgaaagtgcagtagttgcgctttctatttcagaggcagccccaacgccagttgagcgtaaatcaaatgaaccctctttgttagccaaaattattgcgaagattaaaggtttatttgcgactaaatctgaagaaaacaaaccgaaaaataaccgcacttcgcgtaatcctaatcgtaatcaacgccgttcacaggatcgtcgttcttctcgtcgtccacgttctgaaaataacgaaacagaaagaaccgaagaacaggttcgcaatgtccgtgagcgtaatcaacgccgtccgcgccgtaacttagtggaagaaagtatcgctgaaagtgcggtaaattctacacctgtttttgaggctaaagaagaaagaactgagcctgtaactcaacgccgccaacgccgtgatttacgtaaacgcgtgcgcgttgaagataatgaaacagttgttgaaaataacttcagcacgactgaaaaaatgccagaagtggatgtaattacggttcaaaataatgatgaaaaacccgttcatcagaaccaacgttctgaacgtcaagagcgtcagcgtcgtactccacgtcatttacgtgcagcgaataatcagcgtcgtcgccgtaatcaagagccaaaatcgccaatgccattatttgctgcggtggtttcgcctgaattggcaagtggcaaggcttggattgattattcaacggtaaatctgccaaaagaaaatcatttcttatctgtggatgaattgcttgagcaagagaaaactaaaaaagggtttatcacgccagcaatgggaattgtcgttgaagaaaaatcccctgatgtaaaacctgcattagattttattactcaaccagctaatgaatcggtgcagaaaaaagtacaagaatctttagaccgtttaagttcatataaacctcaagaagttgttgaatctattgatcctgcaattaatgtagatgaacctgaaacgctcgagaaagtatcacaatttgtccgcacttatgaatttaatggacgtttaggtacaatttcttcagtgccccatacaaaagcggagatgactttagcgaaagcaaatgatgaaatgccagaggatttcccaattagggcttggcaggattctcgttattatttctatggaaaaggcgcggcaggacatcattgtgcaattagccacgtttattctgaaccaacccgcacaaaatcagaataa

SEQ ID NO: 814 - protein, 935 aa, Haemophilus influenzae
MKRMLINATQKEELRVALVDGQRLFDLDIESPGHEQKKANIYKGKITRVEPSLEAAFVDYGAERHGFLPLKEIAREYFPDDYVFQGRPNIRDILTEGQEVIVQVNKEERGNKGAALTTFVSLAGSYLVLMPNNPRAGGISRRIEGDERTELKEALSSLDVPDGVGLIVRTAGVGKSPEELQWDLKVLLHHWEAIKQASQSRPAPFLIHQESDVIVRAIRDYLRRDIGEILIDSPKIFEKAKEHIKLVRPDFINRVKLYQGEVPLFSHYQIESQIESAFQREVRLPSGGSIVIDVTEALTAIDINSARSTRGGDIEETALNTNLEAADEIARQLRLRDLGGLVVIDFIDMTPIRHQREVENRIRDAVRPDRARIQISRISRFGLLEMSRQRLSPSLGESSHHICPRCQGTGKVRDNESLSLSILRLLEEEALKENTKQVHTIVPVQIASYLLNEKRKAISNIEKRHNVDIIVAPNEAMETPHFSVFRLRDGEEVNELSYNLAKIHCEKDESTEESLVSRNVDTTVVAEQPAVESAVVALSISEAAPTPVERKSNEPSLLAKIIAKIKGLFATKSEENKPKNNRTSRNPNRNQRRSQDRRSSRRPRSENNETERTEEQVRNVRERNQRRPRRNLVEESIAESAVNSTPVFEAKEERTEPVTQRRQRRDLRKRVRVEDNETVVENNFSTTEKMPEVDVITVQNNDEKPVHQNQRSERQERQRRTPRHLRAANNQRRRRNQEPKSPMPLFAAVVSPELASGKAWIDYSTVNLPKENHFLSVDELLEQEKTKKGFITPAMGIVVEEKSPDVKPALDFITQPANESVQKKVQESLDRLSSYKPQEVVESIDPAINVDEPETLEKVSQFVRTYEFNGRLGTISSVPHTKAEMTLAKANDEMPEDFPIRAWQDSRYYFYGKGAAGHHCAISHVYSEPTRTKSE

SEQ ID NO: 815 - DNA, 237 bp, Haemophilus influenzae
gtgcaagccgattgggtgcacgtgcgtgaaaaagtagagacatataatccaaatcaacctgaactattacaagagtatttaaacatcaaaactcattccaaccatcctcgtttttctattggttatgatttcggcaattggcgtttagcattagattactcccattatgatcgctgtttagaaaacgtgcgttttaaaactcacgaagcctctttcggtgtacgttaccgtttttaa

SEQ ID NO: 816 - protein, 78 aa, Haemophilus influenzae
MQADWVHVREKVETYNPNQPELLQEYLNIKTHSNHPRFSIGYDFGNWRLALDYSHYDRCLENVRFKTHEASFGVRYRF

SEQ ID NO: 817 - DNA, 792 bp, Haemophilus influenzae
atgcaatcaatttatctctccaaaatccgtgagcagaatccgctcattcataacattaccaacattgtggcagcgaattttagtgccaatggcttgttggcattaggagcttcgcctttgatgtcggcgaatgtcgaagaaatgcaggaagtaccgaaaatcagtcaagcattggtcattaatattggtacgctgattggtaaagatcgggaggcgatgttgcaggcaggaaaaacagcaaatgaggttggaattcctgtagtgttagatcctgttggtgtgggggcaacgagctatcgccgtgagaccattcgtgagcttttagccgaggtaaaattcgcacttattcgtggtaatgcgggcgaactcgctgcaattgcaggcgaggcgtggcaggcaaaaggtgtagatgcagggcaaggcgaagtagatttaaaagccgttgccgagaaagtggctcaacgctatggctgtacggtattgattagtggggcggtggatattgtcagcgatggcacacaaactgcgaccgttcacaacggcacgtcattgttcccgaaagttacggcttcgggctgtttattgagtgccgtgtgtgctgcatttttagcggtaagtgaagggaattatttttctgcgacattagaagcctgtgtagcatacaccattgcaggcgagtgtgcggcgcaaggcttaaccacacaagtgggacagttccaaatccgtttgttggacgagcttgctgcactttcccctgaaaccattggacaaagagggcgcattaatgagtaa

SEQ ID NO: 818 - protein, 263 aa, Haemophilus influenzae
MQSIYLSKIREQNPLIHNITNIVAANFSANGLLALGASPLMSANVEEMQEVPKISQALVINIGTLIGKDREAMLQAGKTANEVGIPVVLDPVGVGATSYRRETIRELLAEVKFALIRGNAGELAAIAGEAWQAKGVDAGQGEVDLKAVAEKVAQRYGCTVLISGAVDIVSDGTQTATVHNGTSLFPKVTASGCLLSAVCAAFLAVSEGNYFSATLEACVAYTIAGECAAQGLTTQVGQFQIRLLDELAALSPETIGQRGRINE

SEQ ID NO: 819 - DNA, 810 bp, Haemophilus influenzae
atgagtaatgtgaaacaagttttaaccatcgcagggtcagacagtggcggtggtgcaggcattcaagcagatcttaaaaccttccaaatgcgcggcgtgtttggtacatcagcaatcacggcagttacggcacaaaacacacttggcgtatttgatattcaccctattccactgaaaacaattcaagcgcaactggaagcggtcaaaaatgatttccagattgcaagttgcaaaattggtatgttgggcaatgcagaaattattgaatgcgtcgcagattttcttgctgataagcctttcggcacgctggtgctagatcctgtgatgatcgccaaaggtggcgcacccttattgcaacagcaagcggtgagtgcgttaagccaaaaattgctgccgttggcggacgtgattacaccgaacattcccgaagcggaagcattaacggggattgcgattgtggacgacatcagtattcaacaagccgcaaaagcgttgcaaaaacaaggagcgaagaatgtgattattaagggcggacattcgctcaattcgcaaagtgagctgtgccaagattgggttttacttgcagatggtcgtcattttactttgcaaagcccccgtttcaacacgccgcatacacatggtacgggctgtaccttttcagcctgtttaaccgcagagttggcgaaaggcgaaccgttacaaagtgcggtaaaaacagcgaaagattttattaccgctgcgatttctcacccattgaatattgggcaaggacacgggccgacaaatcattgggcttacagtcgcctttaa

SEQ ID NO: 820 - protein, 269 aa, Haemophilus influenzae
MSNVKQVLTIAGSDSGGGAGIQADLKTFQMRGVFGTSAITAVTAQNTLGVFDIHPIPLKTIQAQLEAVKNDFQIASCKIGMLGNAEIIECVADFLADKPFGTLVLDPVMIAKGGAPLLQQQAVSALSQKLLPLADVITPNIPEAEALTGIAIVDDISIQQAAKALQKQGAKNVIIKGGHSLNSQSELCQDWVLLADGRHFTLQSPRFNTPHTHGTGCTFSACLTAELAKGEPLQSAVKTAKDFITAAISHPLNIGQGHGPTNHWAYSRL

SEQ ID NO: 821 - DNA, 681 bp, Haemophilus influenzae
atgaaaaatattcaaaaaatcttaccgctttactttgtggcaggcacgcaagattgccgtcatttgggcgagaacttgtcggaaaatttattattcgtgcttaaacaagcgttagaaggcggaattacctgctttcaatttcgggataaaggcaaattttcgttagaacatacgccctcagcacagaaggcactggcgatgagttgtcgtgatttgtgccgtgaatatggcgtaccctttattgtagacgacaacgttgatttggcgttggaaatcgaggcggatggcattcacgttgggcaaagcgatatgtcagtacaagagattcgagctaaaacagataaaccgctaattattggttggtcggtgaatcgtttagacgaggcaaaaatgggggaaaatttagcggaaattgattattttggaattggcccaattttcccaacgcaatcgaaagagaatccgaaaccaacactaggaatggcgtttattcaaactttgcgaaatgcgggcataactaaaccgcttgtggcaattggtggggtgaaattagctcacgttaaaaccttacgagaatttggggcggatggtgtggcagtgattactgcaattacgcacgccgataatgtgcaaaccgcaacaaaagcattacgggaggcaagtgatgaatacgcaaaatag

SEQ ID NO: 822 - protein, 226 aa, Haemophilus influenzae
MKNIQKILPLYFVAGTQDCRHLGENLSENLLFVLKQALEGGITCFQFRDKGKFSLEHTPSAQKALAMSCRDLCREYGVPFIVDDNVDLALEIEADGIHVGQSDMSVQEIRAKTDKPLIIGWSVNRLDEAKMGENLAEIDYFGIGPIFPTQSKENPKPTLGMAFIQTLRNAGITKPLVAIGGVKLAHVKTLREFGADGVAVITAITHADNVQTATKALREASDEYAK

SEQ ID NO: 823 - DNA, 1305 bp, Haemophilus influenzae
atgaatacgcaaaatagtctaaaacaagtcgcgacagcgacgatggtcggcactgcaattgagtatttcgataactacatttacgcaatggccgcggtattggtatttaaccatcaattcttccatgccgcagatccactttcagggcagattgcggcactttccactttagcacttacttttattgctcgccctttgggagcaatattgttcgggcatttcggtgaccgtttcgggcggaaaaatacttttgtgatgagcttgctgttgatgggcgtttccactgtggttatcggtttgttgccaacctatgacagcatcggtatttgggcgacaattttgctctgtttatgccgtattgggcaaggtatcggtttaggcggagagtggggcggtgcagcgttagttgcggttgaaaatgctccagaaggtaaacgaggttggtatggtactttcccacaactgggagccccgcttggcttgttgttggcaaatggcgtattcttaggcattacggcaattttcgggcaagaagctatgactgaatgggcgtggcggataccgtttttatcttccgttatcttagtggcaattggcttatatgttcgcctaaaactgactgaagccccgattttccttgcggcactcaataaaccgcagccaaaacgcttaccaatgttggaagttgtcactactcattttaagccgtttttcttggggatgttaatttgtattgcaggctatgtgctgttctacattatgattgcctttagccaaatttacgccaaatctgccccaacggtttcagaggcaggatacgcaatgggattaggactttccccgcaaatttttaccgctttattgatggcaagtgcggtttcattggctattaccatcgccgtttcgggcaaatatatcgacaaagttggtcgccgtatttggctcatttggacaaccgttggcgttgcgatttttggtttatccttgccgttatttctcgaaaacggtacaactaccagtttgttttggtttttattcatcggtatggggttaattggaatgggctatggaccattagcgagttttttacctgaactcttccctactcacgcccgctattcaggtgcatcactcacttacaacatcgcaggcttattcggggcaagtgttgcggcaatcattgccttaccgctgaatgctcactacggcttaaaaggtgtggggatttatttaaccctaaacgctgtgttgagcttgattggattatggtttatttcagaaacgaaagataaattactatcctaa

SEQ ID NO: 824 - protein, 434 aa, Haemophilus influenzae
MNTQNSLKQVATATMVGTAIEYFDNYIYAMAAVLVFNHQFFHAADPLSGQIAALSTLALTFIARPLGAILFGHFGDRFGRKNTFVMSLLLMGVSTVVIGLLPTYDSIGIWATILLCLCRIGQGIGLGGEWGGAALVAVENAPEGKRGWYGTFPQLGAPLGLLLANGVFLGITAIFGQEAMTEWAWRIPFLSSVILVAIGLYVRLKLTEAPIFLAALNKPQPKRLPMLEVVTTHFKPFFLGMLICIAGYVLFYIMIAFSQIYAKSAPTVSEAGYAMGLGLSPQIFTALLMASAVSLAITIAVSGKYIDKVGRRIWLIWTTVGVAIFGLSLPLFLENGTTTSLFWFLFIGMGLIGMGYGPLASFLPELFPTHARYSGASLTYNIAGLFGASVAAIIALPLNAHYGLKGVGIYLTLNAVLSLIGLWFISETKDKLLS

SEQ ID NO: 825 - DNA, 102 bp, Haemophilus influenzae
gtggggtattgtagagaaaatatttggcttgtaaaggaaagtgcggttaaattcttagtagaattttatgtaaaatttaaccgcttaataggttgtatttaa

SEQ ID NO: 826 - protein, 33 aa, Haemophilus influenzae
MGYCRENIWLVKESAVKFLVEFYVKFNRLIGCI

SEQ ID NO: 827 - DNA, 1380 bp, Haemophilus influenzae
atgacaacccaattcaaaccagaattactttcccctgcaggctctcttaaaaatatgcgctatgcgtttgcttatggtgcagatgcggtttatgcaggccaacctcgttatagcttacgtgtacgcaataatgaatttaatcacgccaatttgaaaatcgggatcgatgaagcccattcccttggcaaaaaattctatgtagtggtaaacattgcgccccataattccaaactcaaaacttttattaaagatttacaacctgtcatcgatatgaaaccagatgctttaattatgtctgacccaggcttaattatgttggtgcgtgaaaatttccctaatattgatattcatctttctgtgcaagccaatgcggtaaactgggcaacggtaaaattctggaaacaaatgggattaactcgtgtgattttatcgcgcgaactttcaatagatgaaattgctgaaattcgccaacaagtgccagatattgaactcgaaattttcgtacatggtgcgttgtgcatggcgtattctggccgttgcttactttctggctatatcaacaaacgcgatccaaatcaaggcacttgcaccaatgcttgccgttgggaatacaaaatggaagaaggcacgacggatgaaataggcaacatcgtgccgaaaatcgatcctgctcaacaaatcgaagtgaaaaatgtagcaccaaccttaggcgagggtgcggtaacggataaagtcttcctttataccgaatcacaaaagcctgacgaacaaatgacagcgtttgaagatgagcacggtacctactttatgaattcaaaagatctgcgtgccgtacaacatgtggaaaaattgaccgcacttggtgtgcattctttaaaaatcgaaggccgcactaaatcattttattattgtgcaagaacggctcaagtttaccgcaaagcaattgatgatgcagccgcaggcaaaccatttgatgaaagcttaatggatacgttggaatcccttgcacatcgtggttataccgagggcttcttgcgccgtcatacgcatgatgaataccaaaactacgaatatggctattctatttctgatcgtcagcaatttgtcggtgaatttacgggcaaacgtaatgaacaaggtatggcagaagtagcagtaaaaaacaaattcttacttggcgacaatgtagaaatgatgacgccacaaggcaatattaatttcaaaattgaaaaaatgctaaatcgtaaaaatgaaacggttgatgccgcactaggcgatgggcattttgtattcttaaatgtaccacaagatattaacttaaattacgctttattaatgcgtaatttagttaataccaatacaagaaacccgcattgctag

SEQ ID NO: 828 - protein, 459 aa, Haemophilus influenzae
MTTQFKPELLSPAGSLKNMRYAFAYGADAVYAGQPRYSLRVRNNEFNHANLKIGIDEAHSLGKKFYVVVNIAPHNSKLKTFIKDLQPVIDMKPDALIMSDPGLIMLVRENFPNIDIHLSVQANAVNWATVKFWKQMGLTRVILSRELSIDEIAEIRQQVPDIELEIFVHGALCMAYSGRCLLSGYINKRDPNQGTCTNACRWEYKMEEGTTDEIGNIVPKIDPAQQIEVKNVAPTLGEGAVTDKVFLYTESQKPDEQMTAFEDEHGTYFMNSKDLRAVQHVEKLTALGVHSLKIEGRTKSFYYCARTAQVYRKAIDDAAAGKPFDESLMDTLESLAHRGYTEGFLRRHTHDEYQNYEYGYSISDRQQFVGEFTGKRNEQGMAEVAVKNKFLLGDNVEMMTPQGNINFKIEKMLNRKNETVDAALGDGHFVFLNVPQDINLNYALLMRNLVNTNTRNPHC

SEQ ID NO: 829 - DNA, 1320 bp, Haemophilus influenzae
atgaatttatcccaatttgaacaattcgatctttctcccgaacttttaaaggcgcttgagaaaaaaggttattcccgcccaacagctattcaaatggaagccattcctgccgcaatggaagagcgtgatgtattaggctctgctccaacgggaacagggaaaaccgctgcttttttattacctgcgctacaacatttattggattatccacgccgtaaaccaggcccaccgcgtattttggtattaacaccaacccgagaactggcaatgcaagtggctgaacaagcggaagaattagcgcagttcacccatttaaatattgcgacaattacaggtggtgtggcgtatcaaaatcacggtgatgtattcaataccaatcaagatttggtggtggcaacgcccggtcgtttgttgcaatacattaaggaagaaaattttgattgccgttccgttgaaatgctgatttttgatgaagccgatagaatgttgcaaatgggatttgggcaagatgcggaaaaaattgcagctgaaacccgttggcggaaacaaactttgttgttttctgcaaccttagaaggggagctattagtcgattttgcggagcgtttgttgaatgatcctgtgaaagtagatgcggaaccaagtcgccgtgaaagaaaaaaaatcaaccaatggtattatcacgcagacagcaatgaacacaaaatcaaattgcttgcgcgttttattgaaactgaagaagtaacccgtggaattgtgtttgttcgccgtcgtgaagatgcgcgtgaactttctgaaacattgcgtaaacgaggcattcgttccgcatatttagaaggcgaaatggcacaaactcaacgtaacaatgccattgataaattgaaatcaggtattgtgacggtattggttgcaacagatgtggctgcgcgtggtattgatattgatgatgtaagccacgtgatgaattttgatttgccctatagtgcggatacttatttacatcgaattggacgtaccgcacgagcaggcaaaaaaggcacggcggtctcttttgtcgaagcgcatgattacaagttgctaggtaaaatcaaacgttatactgaggaaattttaaaggcgcgcattttagcaggtttagaacctcgcaccaaaccaccaaaagatggcgaagtgaaatcggtcagcaaaaaacaaaaggcacgtattaaagaaaaacgcgaagaaaagaaaaaaacagaggcaaagaaaaaagtaaaattgcgtcataaggatacgaaaaatatcggcaaacgacgcaagccaagtaacagtaatgtttaa

SEQ ID NO: 830 - protein, 439 aa, Haemophilus influenzae
MNLSQFEQFDLSPELLKALEKKGYSRPTAIQMEAIPAAMEERDVLGSAPTGTGKTAAFLLPALQHLLDYPRRKPGPPRILVLTPTRELAMQVAEQAEELAQFTHLNIATITGGVAYQNHGDVFNTNQDLVVATPGRLLQYIKEENFDCRSVEMLIFDEADRMLQMGFGQDAEKIAAETRWRKQTLLFSATLEGELLVDFAERLLNDPVKVDAEPSRRERKKINQWYYHADSNEHKIKLLARFIETEEVTRGIVFVRRREDARELSETLRKRGIRSAYLEGEMAQTQRNNAIDKLKSGIVTVLVATDVAARGIDIDDVSHVMNFDLPYSADTYLHRIGRTARAGKKGTAVSFVEAHDYKLLGKIKRYTEEILKARILAGLEPRTKPPKDGEVKSVSKKQKARIKEKREEKKKTEAKKKVKLRHKDTKNIGKRRKPSNSNV

SEQ ID NO: 831 - DNA, 699 bp, Haemophilus influenzae
atgagcggatttacctttaaacagttccatatcaatcaaaattcttgtgcaatgaaagtcggcactgatggcattttgttaggtgcttgggctgatgtaaagcattgtaaaaatattttagatatgggctgtggcacaggattattggcgttaatgttggcacaacgaactgaagaaaactgtcaaattcaagcggttgagttggatcccattgcagcaaaacaagcacaagaaaacatcaatgattcagtgtggaaaaatcgcattcaacttattcaaacggatatacaacattttttacaaaccactgcacaaacctttgatttaattgtggcaaatccaccttattttgaacaaggtatcgcttgtaaaaatgaagaacgagaattggctcgttataccaagcaaagccacttaaattggttagaatgggctgccacgcgcttatcggaaaatgggaaaatcagttttgttttgccttatgaggcaggcaaaacgctcacaaaatccaccgcacttttttgcataaaacagaccaatgtcatgaccaaagtgggaaaaacgccccagagaatgttgcttacctttgccaaacaacccgaagttttaatgcaagatcaattggtaatttatgatgcggataatcaatacactgaagcgtttattgaattgactaaagacttttatttgaaattttaa

SEQ ID NO: 832 - protein, 232 aa, Haemophilus influenzae
MSGFTFKQFHINQNSCAMKVGTDGILLGAWADVKHCKNILDMGCGTGLLALMLAQRTEENCQIQAVELDPIAAKQAQENINDSVWKNRIQLIQTDIQHFLQTTAQTFDLIVANPPYFEQGIACKNEERELARYTKQSHLNWLEWAATRLSENGKISFVLPYEAGKTLTKSTALFCIKQTNVMTKVGKTPQRMLLTFAKQPEVLMQDQLVIYDADNQYTEAFIELTKDFYLKF

SEQ ID NO: 833 - DNA, 1056 bp, Haemophilus influenzae
atgaacgacaaacgcaaaccgtcttttcaatccgcaggcaaaacctttcaagaacgctcagtgggggaaaagtacagagaaaaaccaactcaaaatcgaccgcactttaatgataaatttcatggaaatagaaacgaaaaatctcgtttttctcgtgataaacaagaagtgaaagaaactagaattacgcaactttctttatctcgtgcgccatcaaataaaaatttagaaaaacctaaggttcaagtgacaataaaaagtacgggtacggtttataaaacaaaagaaaagaaaacgggcgcgctttctcctcgtgcacctgaaaaaattaagaaaaaccgtgcggaagaaatgaaggtttatggtgaaaatgcctgtttagctttatttgcagaacgcgctgaaagtattgttcgattgtgggcaaccgtacaaatgtcacacaaaattggcgaggtattgagttatttagccgaaaacaagaaggcttatcacgttgtagatagtgaagaattagcccgagtgagcggaacagaacatcacggtggtatttgcttattagtgaagaaacctcgtgctttcacgttgcaaggatatttggatattcctcgtaacgaggattgtttagtgctattagacaacgtgaataatgcacaaaatatcggaggtgtattgcgtacttgtgcttattttggcgtgaaaaatattgtcgccgataatgtggaaaatctgtattcgggagcctctatgcgtgtagcagaaggtggcgcagaatatattcgtgtgttagaaacggatgatattgattcggcgttgatgcacttgcgtaaatcaggctatcaaattattcacgtattgcacaataaacaaggcgacccattggataaagtgcggttaaaaaataaagtggtttttgtgctaagtgaaagttctacggaaagtttagcaacgccagaagatacacaagtgcgtttaacgctcgcaagcccaattaaatcaggcttaaacattgcagtgaatgcgggtgtgttgttagcgaagtggtattttagatag

SEQ ID NO: 834 - protein, 351 aa, Haemophilus influenzae
MNDKRKPSFQSAGKTFQERSVGEKYREKPTQNRPHFNDKFHGNRNEKSRFSRDKQEVKETRITQLSLSRAPSNKNLEKPKVQVTIKSTGTVYKTKEKKTGALSPRAPEKIKKNRAEEMKVYGENACLALFAERAESIVRLWATVQMSHKIGEVLSYLAENKKAYHVVDSEELARVSGTEHHGGICLLVKKPRAFTLQGYLDIPRNEDCLVLLDNVNNAQNIGGVLRTCAYFGVKNIVADNVENLYSGASMRVAEGGAEYIRVLETDDIDSALMHLRKSGYQIIHVLHNKQGDPLDKVRLKNKVVFVLSESSTESLATPEDTQVRLTLASPIKSGLNIAVNAGVLLAKWYFR

SEQ ID NO: 835 - DNA, 1368 bp, Haemophilus influenzae
atgttaatcaataaaaccaaacgagctgaacaaaatttaaataatttgccattccttgccttgcaagccgagcaaattgaatttttgggtagctcggctgaatttaaaactcaaattattgaattaatcagaaacgcaaaaaaacgtatttatgtcaccgcactttattggcaaaaagacgaagcggggcaggaaattctcgatgaaatttatcgcgtgaagcaagaaaatccacacttggatgtaaaaattctcatagattggcatcgcgcacaacgcaatttattaggagcggaaaaatctgccactaatgcagactggtattgcgagcaacgccaaacttatcagttacctgatgatccaaatatgttctttggcgtgccaattaatacacgcgaagtttttggtgtattgcacgttaaaggctttgtatttgatgatacggtgctttatagcggtgcaagcattaataacgtctatcttcatcaatttgaaaaatatcgttacgaccgctatcaaaaaatcactcatgccgaattagctgattcaatggtaaatttcatcaatgattacttgttagatttcagtgcagtttatccacttgatgtcgccaaccgccctcgcaccaaagagatccgtggcaatattcgcgcttatcgtaaagaccttgctcaaaatggagaatattcattaaaaagtgcggtgaaattaccaaatgttttaagcgtatcgccattgtttggcttaggcgcatcaggcaatgaattaaatcaagtaattgaagatttattcttacaagtacaaaaaaaattagtgatttgtacgccatattttaatttcccacgcacattgcaacataaaatagcaacgttattggaaaacggtaaacgagtagaaattattgttggcgataaagtcgcaaacgatttttacattccaccagaacaaccattcaaaatggcgggggcgttaccttatctttatgaaagtaatcttcgccgtttctgtgaaaaatttgagactcaaattgaaagtggtcagcttgtggtgcgtttgtggcgtgatggcgataatacctaccacttaaaaggcgtgtgggtagatgaccgttatattttacttacgggcaataatcttaaccctcgagcgtggcgtttggatgcagaaaatggcttattaatttacgatccacaacaacagcttttagcccaagtggaaaaagagcaaaaccaaattcgccaacatacaaaagtattaaaacattactctgaattagaagaattgaatcaatacccagaaccagtgcaaaaacttttgaaaaaatttgcacgaattaaagcagataaattggtgaaaatgattttgtaa

SEQ ID NO: 836 - protein, 455 aa, Haemophilus influenzae
MLINKTKRAEQNLNNLPFLALQAEQIEFLGSSAEFKTQIIELIRNAKKRIYVTALYWQKDEAGQEILDEIYRVKQENPHLDVKILIDWHRAQRNLLGAEKSATNADWYCEQRQTYQLPDDPNMFFGVPINTREVFGVLHVKGFVFDDTVLYSGASINNVYLHQFEKYRYDRYQKITHAELADSMVNFINDYLLDFSAVYPLDVANRPRTKEIRGNIRAYRKDLAQNGEYSLKSAVKLPNVLSVSPLFGLGASGNELNQVIEDLFLQVQKKLVICTPYFNFPRTLQHKIATLLENGKRVEIIVGDKVANDFYIPPEQPFKMAGALPYLYESNLRRFCEKFETQIESGQLVVRLWRDGDNTYHLKGVWVDDRYILLTGNNLNPRAWRLDAENGLLIYDPQQQLLAQVEKEQNQIRQHTKVLKHYSELEELNQYPEPVQKLLKKFARIKADKLVKMIL

SEQ ID NO: 837 - DNA, 726 bp, Haemophilus influenzae
atgcaaaacaataacgacattttaaaagcccaaagtccagcagctttagcagaggaatatattgtaaagagtatttggcaagatgtttttcctgcgggcagtaatttgccatcagaacgtgatttagccgataagattggtgtaactcgcaccaccctacgtgaagttttacaacgtttggctcgtgatggttggctaacaattcagcacggcaaacccaccaaagtaaataatatttgggatgctgcagggccgaatattattgaaaccctaattgctttggatatgcagtccgcccccttaattattgataatatgctctctttacgtagtaaaatgtcggaatcttacatttatgaagcagtaaaaaattcccctcaaaaatcaaccgcactttttgctgaattagagcaattacaaaacacagcacaagattacacagaatttgattaccaattatttcgtcaattcactgttgttgccaacaaacccttttatcgtttaattttcaatagtttaaaaggcgtttatcagcgaatagggttgttattttttaaagaaaaaaaacaccgtgaattaacaaagcaattttatttagaaatgcaacaaatttgtcttgagggaaatgcagatgcagtagtggattgcatccgtaaacataatttacgttcttcaacctattggaaagccattttagaacgattgccacaaaatttatcagattaa

SEQ ID NO: 838 - protein, 241 aa, Haemophilus influenzae
MQNNNDILKAQSPAALAEEYIVKSIWQDVFPAGSNLPSERDLADKIGVTRTTLREVLQRLARDGWLTIQHGKPTKVNNIWDAAGPNIIETLIALDMQSAPLIIDNMLSLRSKMSESYIYEAVKNSPQKSTALFAELEQLQNTAQDYTEFDYQLFRQFTVVANKPFYRLIFNSLKGVYQRIGLLFFKEKKHRELTKQFYLEMQQICLEGNADAVVDCIRKHNLRSSTYWKAILERLPQNLSD

SEQ ID NO: 839 - DNA, 1545 bp, Haemophilus influenzae
atgacaaacattcaggcttttatgaaaaactttcttggggcaagtccagaatggtacaaacttgccattgtggtttttcttattataaatccaattgttttcttttttattagcccttttattgcgggttggttactggttgcagaatttattttcacattggcaatggcattaaaatgctaccctcttcaaccgggtggtctattagcaattgaagctattattattggaatgacaaatgccaaacacgtcaaagcagaaattatggcaaactttgaagtgatcttgctactgatatttatggtggcaggtattttctttatgaaacaattactgctttatgtatttactaaattacttgtcaaaattcgttctaaaattgcactttctattgccttttgttttagtgctgcttttttatcggcttttctcgatgctttaacggttgttgctgttatcattagtgtcgcaatgggattttatggtgtgtatcacaaagttgcatcaggcaataatttaattgatgcggttgatatttcagacgatggaaaaattattgaacaacagcacgaaatcttagaaaaattccgtgcattcttacgtagtttaatgatgcatgcaggtgtaggaactgcactcggtggtgtaatgaccgttgttggagaaccgcaaaacttaattattgcagaacaagcaaaatggaactttatggaatttttcttgcgtatggcacccgtgactattcctgtgtttatctgcggattactcacttgtttcttggtcgaaaaattcaaattatttggttatggcgagaaattaccagacgaagtgtggaaaatcttatcagatttagatcgcactaattcagaaaaaatgtctaaacaagataaaattaaattaggtatgcaagcgttaatcgcaatttggttaattcttggattagcattccatcttgccgcagtcggtttaattggtttaagtatcatcatttttgctacgtctttcactggtgtgacggatgaacatactatcggtaaagcctttcaggaatctttaccctttactgcattgctcgttgtattcttttctgttgttgcagtaattattgatcaaaaacttttttcaccaattattcacttcgttctttctgcggaagaaaatacacaacttgctttattctatttgtttaatggcttgctttcttctatttctgataatgtatttgttgcaacggtttatattaatgaagctaaagctgcactgactaatggagtaattgcaccgcatcaatttgaattgctttctgttgccattaatacaggtacaaacttaccatcagttgcaacaccaaatggacaagctgctttcttattcttattgacttcatcaatttcgccattaattcgcctttcttatggcagaatggtttatatggctttaccttacacgattgtactttcaatcattggtttactggctattgaatttattttaccagctgccacaatttggttagcaagtttaggtttaattttgccaatttaa

SEQ ID NO: 840 - protein, 514 aa, Haemophilus influenzae
MTNIQAFMKNFLGASPEWYKLAIVVFLIINPIVFFFISPFIAGWLLVAEFIFTLAMALKCYPLQPGGLLAIEAIIIGMTNAKHVKAEIMANFEVILLLIFMVAGIFFMKQLLLYVFTKLLVKIRSKIALSIAFCFSAAFLSAFLDALTVVAVIISVAMGFYGVYHKVASGNNLIDAVDISDDGKIIEQQHEILEKFRAFLRSLMMHAGVGTALGGVMTVVGEPQNLIIAEQAKWNFMEFFLRMAPVTIPVFICGLLTCFLVEKFKLFGYGEKLPDEVWKILSDLDRTNSEKMSKQDKIKLGMQALIAIWLILGLAFHLAAVGLIGLSIIIFATSFTGVTDEHTIGKAFQESLPFTALLVVFFSVVAVIIDQKLFSPIIHFVLSAEENTQLALFYLFNGLLSSISDNVFVATVYINEAKAALTNGVIAPHQFELLSVAINTGTNLPSVATPNGQAAFLFLLTSSISPLIRLSYGRMVYMALPYTIVLSIIGLLAIEFILPAATIWLASLGLILPI

SEQ ID NO: 841 - DNA, 534 bp, Haemophilus influenzae
atgctcgcactattaaaacaattttccgaaaaacgttttgtgtggtttttattggctttttcaagtttagccttagaatccaccgcactttacttccaatatggaatgggcttacaaccttgtgtgctctgtgtttatgaacgtttagcaatgattggcttatttgtagcgggcattatcgcattacttcaacctcgcactttcatacttcgattaatcgccttggctttaggtttattcagcagtattaagggcttattaatttcatttcgtcatcttgatttgcaaatgaatccagctccttggaaacaatgtgagtttattccaaattttcccgagactttaccatttcatcaatggtttccatttatatttaacccgactggctcttgtaatgaaagccaatggtcattatttggtttaacgatggtgcaatggctagtggttattttttcactatatgtggttattctcacattattgttaatcgcacaagtgattaaaacacggaaacaaagaagattatttaactaa

SEQ ID NO: 842 - protein, 177 aa, Haemophilus influenzae
MLALLKQFSEKRFVWFLLAFSSLALESTALYFQYGMGLQPCVLCVYERLAMIGLFVAGIIALLQPRTFILRLIALALGLFSSIKGLLISFRHLDLQMNPAPWKQCEFIPNFPETLPFHQWFPFIFNPTGSCNESQWSLFGLTMVQWLVVIFSLYVVILTLLLIAQVIKTRKQRRLFN

SEQ ID NO: 843 - DNA, 1833 bp, Haemophilus influenzae
atgtgtggtattgtcggtgcagtagcgcaacgagatgtagcggaaatcttaattaatggtttacatcgtttagaatatcgtggttatgattcagctggtgttgcagtaatcaataaacaaaatgaattacaacgtattcgttgtttaggcaaagttaaagctttagatgaagccgtatcagaaaaaccattaattggtggaacgggaattgcacatactcgctgggcaactcacggcgaaccatcagaaactaatgcgcatccgcattcatcaggtacttttgctgtagtacataacggtattattgaaaatcacgaagaacttcgcgaattattaaaatctcgtggttatgtctttttatcacaaacagatactgaagtgatcgctcacctcgttgaatgggaaatgcgtagcacggattcccttttagaggctgtgcagaaatcggtaaaacaactcatgggcgcatacggtatggtggtaatggacagccgtcatcctgaacatttagtggcagcgcgttctggtagtccacttgtgattggcttaggtatcggtgaaaatttcttagcttcagatcaacttgcacttttaagtgttactcgccgttttatctttttagaagaaggggatattgcagaaattacacgtcgtacagttgatatttatgatactcacggtaataaggctaaacgtgaaattcacgagtctaatcttgaaaatgacgctgcagagaaaggtaaattccgtcattttatgcagaaagaaatttacgaacagccaaccgcacttattaatacaatggaagggcgtattaatcacgaaaatgtgattgtcgattcaatcggtaatggtgcaaaaggcattttagaaaaagttgagcatattcaaattgttgcttgtggtacatcttataatgcaggtatggtggcgcgttattggtttgaatctttagctggagtgagctgtgatgttgaaattgcatcagaatttcgttatcgcaaatttgttacccgtccaaatagcttattgattaccctttctcaatctggcgaaacagccgatactttagctgcacttcgtttagcgaaagaaaagggctatatggcggtattaacaatttgtaatgttgctggctcttcgctcgtacgcgaatcagatcttgcatttatgactcgtgctggtgttgaagttggggtggcatcaacaaaagcatttacgacacagctcgttgcattattaatgctggtaacggcacttggtaaagttaaaggtcatatttctgtagaaaaagaacgtgagattatcaaagcaatgcaatctttacctgctgaaattgaaaaagcattagcctttgattcagaaattgaagctttagcagaggattttgctgaaaaacatcatgcacttttcttaggtcgtggtgcgttttatccaattgccgtagaggcttctttgaaattgaaagagatttcttatattcacgctgaggcctatgcggcgggagaattgaaacacgggccattagcgttaattgatgctgatatgccagtgattgttgttgcaccaaataatgaattattagaaaaagtaaaatcgaacattgaggaagtgcgagctcgtggcggtcaattatacgtatttgccgataaagaagcaggatttacgccaagtgaaggaatgaaaatcatcacgatgccaaaagtcaatgatattgttgcaccgattttttataccattccaatgcaattactttcttattatgtggctttaattaaaggcactgatgtagatcaacctcgtaacttagcaaaatcagttaccgttgaataa

SEQ ID NO: 844 - protein, 610 aa, Haemophilus influenzae
MCGIVGAVAQRDVAEILINGLHRLEYRGYDSAGVAVINKQNELQRIRCLGKVKALDEAVSEKPLIGGTGIAHTRWATHGEPSETNAHPHSSGTFAVVHNGIIENHEELRELLKSRGYVFLSQTDTEVIAHLVEWEMRSTDSLLEAVQKSVKQLMGAYGMVVMDSRHPEHLVAARSGSPLVIGLGIGENFLASDQLALLSVTRRFIFLEEGDIAEITRRTVDIYDTHGNKAKREIHESNLENDAAEKGKFRHFMQKEIYEQPTALINTMEGRINHENVIVDSIGNGAKGILEKVEHIQIVACGTSYNAGMVARYWFESLAGVSCDVEIASEFRYRKFVTRPNSLLITLSQSGETADTLAALRLAKEKGYMAVLTICNVAGSSLVRESDLAFMTRAGVEVGVASTKAFTTQLVALLMLVTALGKVKGHISVEKEREIIKAMQSLPAEIEKALAFDSEIEALAEDFAEKHHALFLGRGAFYPIAVEASLKLKEISYIHAEAYAAGELKHGPLALIDADMPVIVVAPNNELLEKVKSNIEEVRARGGQLYVFADKEAGFTPSEGMKIITMPKVNDIVAPIFYTIPMQLLSYYVALIKGTDVDQPRNLAKSVTVE

SEQ ID NO: 845 - DNA, 273 bp, Haemophilus influenzae
atgaacaaaacagatttaattgatgcaattgcaaacgctgcagagttaaacaaaaaacaagctaaagcagcgttagaagcgactttagatgcaattactgcaagcctaaaagaaggtgagcctgtacaattaatcggtttcggtacatttaaagtaaatgaacgtgctgctcgtactggtcgcaacccacaaactggtgctgaaatccaaatcgcagcatctaaagtgccagcatttgtatctggtaaagcattaaaagatgcaatcaaataa

SEQ ID NO: 846 - protein, 90 aa, Haemophilus influenzae
MNKTDLIDAIANAAELNKKQAKAALEATLDAITASLKEGEPVQLIGFGTFKVNERAARTGRNPQTGAEIQIAASKVPAFVSGKALKDAIK

SEQ ID NO: 847 - DNA, 537 bp, Haemophilus influenzae
gtgggtattcaatatgaaattaatcctaaactcgttcgtggtttagattattacaacaaaactgtatttgaatgggtaacctccgctcttggtgcacaaggtaccgtgtgtggcggcggtcgttatgacggtttagtggaacaacttggcggacacgcaacgccaagtatcggatttgcgatgggattagagcgtttagtcttgttggtacaagaagttaatccaaatattcctgcgaaaagtgcggtggatatttatgttgtttatcaaggcgaaggcgcaacattagccgcttttgaattagcggaaaaagtacgctcggaattaccgcacttaaataccatgttgcactgctctagcggtaattttaaaaaacaatttaaacgtgcagataaatctggtgcaacattggcattagttatcggcgaaagcgaagtacaaaataaacaagtcgttgttaaacacttacaaggtggcacagatcagcaaaccttagatttagtgaatataatcgactatcttcaaactcaattttaa

SEQ ID NO: 848 - protein, 178 aa, Haemophilus influenzae
MGIQYEINPKLVRGLDYYNKTVFEWVTSALGAQGTVCGGGRYDGLVEQLGGHATPSIGFAMGLERLVLLVQEVNPNIPAKSAVDIYVVYQGEGATLAAFELAEKVRSELPHLNTMLHCSSGNFKKQFKRADKSGATLALVIGESEVQNKQVVVKHLQGGTDQQTLDLVNIIDYLQTQF

SEQ ID NO: 849 - DNA, 363 bp, Haemophilus influenzae
  misc_feature 344, 345, 346, 347, 348: n is any nucleotide
atggcttattccattgaagaagaacaagagattaaccagttaaaagactggtggaaagagaatggcaaaacaattattgtcgcttttatcttaggtgtgggtggtatgtttggatggcgttattggcaaacccaccaagtagaacaaatcgctcaagcttctgcacaatacgatactttaattaattctgtgcaacaagacgaacaggctaaaaaagcaaatatagaacaatttgtgcaagcgaatagcaaaactgcatacgctgtatttgctttgttagatgaagcgaaaaaagccactgaaaaacaagatttttcagcagcagaagcaaatttaaaccaagnnnnncattccattcattaa

SEQ ID NO: 850 - protein, 120 aa, Haemophilus influenzae
  VARIANT 115, 116: Xaa is any amino acid
MAYSIEEEQEINQLKDWWKENGKTIIVAFILGVGGMFGWRYWQTHQVEQIAQASAQYDTLINSVQQDEQAKKANIEQFVQANSKTAYAVFALLDEAKKATEKQDFSAAEANLNQXXHSIH

SEQ ID NO: 851 - DNA, 522 bp, Haemophilus influenzae
  misc_feature 4, 5, 6, 7, 8: n is any nucleotide
atgnnnnntttcggattaacgggctgtattgcaccaccaaaagggttagaaaaagagcgattctcaattaattcctatcgcgagatttctcctcaggatttgacctgtcattgtaaaacagttcgacttggaggaaaaattatcaatactaccgttttagcaaatcaaacaaaaattgaagtgttaagtttacccgtatcatcaatttcaggtaaaccatttgttgaattgcaatccgatggtcgctttatcgtgtatttcaacggttttgttgagcctgaaaatttaaaagaacgttatattactgtaggtggtcaattagctggaacagagaaaggcaaaatagaacaagctgattatacttatcctgttgttcaagcggataaataccgtatttggacactcagtaccatctatgagtatccaacagatgattgggatgaagatgatgattggggattttttagatggagacatcgcccttggtatgttcagcctgaaattcactattatttgaattaa

SEQ ID NO: 852 - protein, 173 aa, Haemophilus influenzae
  VARIANT 2, 3: Xaa is any amino acid
MXXFGLTGCIAPPKGLEKERFSINSYREISPQDLTCHCKTVRLGGKIINTTVLANQTKIEVLSLPVSSISGKPFVELQSDGRFIVYFNGFVEPENLKERYITVGGQLAGTEKGKIEQADYTYPVVQADKYRIWTLSTIYEYPTDDWDEDDDWGFFRWRHRPWYVQPEIHYYLN

SEQ ID NO: 853 - DNA, 675 bp, Haemophilus influenzae
  misc_feature 652, 653, 654, 655, 656: n is any nucleotide
atggaaaaaatttggtttcaaaattatccagaaggttctgaaaaatttttggatacctcaaaatatgaatctattttggatatgttcgacaaagcagtgcgcgaacatccagatcgccccgcttacattaatatggggcaagtacttactttccgtaaattagaagagcgcagtcgtgcatttgccgcgtatttgcaaaatgaatttaaacttcaacgtggagatcgcgtggcattaatgatgccaaatttattgcaatatcccatcgcactttttggtattttgcgggctggcttaattgcagtaaatgtcaatcctctttacacaccgagagaattagagctccagttgcaagatagtggtgcggtagcgattgtcgtggtatcaaattttgcttctaccttggaaaaagtcgttttcaataccaatgttaaacacgttattcttacccgaatgggcgatcaactttcttttggtaaacgtactttagtcaattttgtcgtaaaatatgtgaaaaaactggtgccgaaatataaattaccgcacgcagtgacgttccgagaagtattgagtattggtaaatatcgccaatatgttcgtccagaaatatcgcgtgaggatttagcctttttacaatacactggcggtacannnnncattccattcattaattaa

SEQ ID NO: 854 - protein, 224 aa, Haemophilus influenzae
  VARIANT 218, 219: Xaa is any amino acid
MEKIWFQNYPEGSEKFLDTSKYESILDMFDKAVREHPDRPAYINMGQVLTFRKLEERSRAFAAYLQNEFKLQRGDRVALMMPNLLQYPIALFGILRAGLIAVNVNPLYTPRELELQLQDSGAVAIVVVSNFASTLEKVVFNTNVKHVILTRMGDQLSFGKRTLVNFVVKYVKKLVPKYKLPHAVTFREVLSIGKYRQYVRPEISREDLAFLQYTGGTXXIPFIN

SEQ ID NO: 855 - DNA, 591 bp, Haemophilus influenzae
atgcgaaatccgattcataaacgcttagaaaacttagaaagttggcaacatcttacttttatggctgctttatgtgaacgtatggcaccaaattttaaattgttctgtcaaatgaacgagcttagcgttgaaaccaaaacgtatcaaaatattctcaatttggtgtgggaatatttaacaattaaagatgtcaaaatcaactttgaaaatcagttggaaaaattggaaacgattattcctgatgtgaatgattatgatagttttggtgttgtgccagcattagatgcctgtcaggctttagctgaaattttacacgccattattgcgggcgaaaccttagaaaaagcggtggaaataagcttaatttcgttgggaacagtaagggcattattggaaacagaaactggacgagattggtcagaaagtaaactaaaagaaaatgaagatattcaaacagaacttgatgtgcaatggcaagtttatcgtttgcttaaagaatgtgaaaaacgtgatattgaattaattttagctttaaaaaatgaaattcggactgagggtatatctaacattggtatagaatttcatcaataa

SEQ ID NO: 856 - protein, 196 aa, Haemophilus influenzae
MRNPIHKRLENLESWQHLTFMAALCERMAPNFKLFCQMNELSVETKTYQNILNLVWEYLTIKDVKINFENQLEKLETIIPDVNDYDSFGVVPALDACQALAEILHAIIAGETLEKAVEISLISLGTVRALLETETGRDWSESKLKENEDIQTELDVQWQVYRLLKECEKRDIELILALKNEIRTEGISNIGIEFHQ

SEQ ID NO: 857 - DNA, 795 bp, Haemophilus influenzae
atgaaaatacttcaacaagatgattttggttattggttgcttacacaaggttctaatctgtatttagtgaataatgaattgccttttggtatcgctaaagatattgatttggaaggattacaggcaatgcaaattggagaatggaaaaatcatccgttgtggcttgtggctgagcaagaaagtgatgaacgagaatatgtgagtttgagtcacttgctttcactgccagaggatgaattccatatattaagccgaggtgtggaaattaatcattttctgaaaacccataaattctgtggaaagtgcggtcataaaacacaacaaattcaagaagagcttgcagtgcaatgtactcactgtgggtatcaaacttatcctgtgatttgcccatcaattattgttgcggttcgtcgtggtcacgaaattctattggcaaatcataagcgacattatagtcctaacggaggaatatacacgacgcttgcaggttttgtcgaagtaggggaaacatttgaacaagcagtgcagagagaggtttttgaagaaacagggatttcaataaaaaatcttcgttatttcggtagccagccttgggcatttccaaactctcaaatggtcggctttcttgctgattatgaaagcggagaaataacattgcaggaaagtgaaatttatgatgcacaatggttttcttatgatcaacccttgccagaattaccgccaacgggtactatcgctcgcaaattaattcatgcgacgcttgaactttgtaaagcggaacataaatgcgattaa

SEQ ID NO: 858 - protein, 264 aa, Haemophilus influenzae
MKILQQDDFGYWLLTQGSNLYLVNNELPFGIAKDIDLEGLQAMQIGEWKNHPLWLVAEQESDEREYVSLSHLLSLPEDEFHILSRGVEINHFLKTHKFCGKCGHKTQQIQEELAVQCTHCGYQTYPVICPSIIVAVRRGHEILLANHKRHYSPNGGIYTTLAGFVEVGETFEQAVQREVFEETGISIKNLRYFGSQPWAFPNSQMVGFLADYESGEITLQESEIYDAQWFSYDQPLPELPPTGTIARKLIHATLELCKAEHKCD

SEQ ID NO: 859 - DNA, 597 bp, Haemophilus influenzae
atggaacaagcaacccagcaaatcgctatttctgatgccgcacaagcgcattttcgaaaacttttagacacgcaagaagaaggaacgaatattcgtattttcgtcgttaatccgggtacgcctaatgcggaatgtggcgtatcttattgccccccgaatgccgtggaagaaagcgatattgaaatgaaatataatactttttctgcatttattgatgaagtgagtttgcctttcttagaagaagcagaaattgattatgttaccgaagagcttggtgcgcaactgaccttaaaagcaccgaatgccaaaatgcgtaaggtggctgatgatgcaccattgattgaacgtgttgaatatgtaattcaaactcaaattaacccacagcttgcaaatcacggtggacgtataaccttaattgaaattactgaagatggttacgcagttttacaatttggtggtggctgtaacggttgttcaatggtggatgttacgttaaaagatggcgtagaaaaacaacttgttagcttattcccgaatgaattaaaaggtgcaaaagatataactgagcatcaacgtggcgaacattcttattattag

SEQ ID NO: 860 - protein, 198 aa, Haemophilus influenzae
MEQATQQIAISDAAQAHFRKLLDTQEEGTNIRIFVVNPGTPNAECGVSYCPPNAVEESDIEMKYNTFSAFIDEVSLPFLEEAEIDYVTEELGAQLTLKAPNAKMRKVADDAPLIERVEYVIQTQINPQLANHGGRITLIEITEDGYAVLQFGGGCNGCSMVDVTLKDGVEKQLVSLFPNELKGAKDITEHQRGEHSYY

SEQ ID NO: 861 - DNA, 687 bp, Haemophilus influenzae
atgaatttttttaattttcgctgtatccactgtcgtggcaatcttcatattgcaaaaaatgggctatgttcaggttgccaaaaacaaattaaatcttttccttattgcggtcattgtggtgcggaattgcaatattatgcacagcattgtgggaattgccttaaacaagaacctagttgggataagatggtcattattgggcattatattgaacctctttcgatattgattcaccgttttaaatttcaaaatcaattttggattgaccgcactttagctcggcttttatatcttgcggtgcgtgatgctaaacgaacgcatcaacttaaattgccagaagcaatcattccagtgcctttatatcattttcgtcagtggcgacggggttataatcaggcagatttattatctcggcaattaagtcgttggctggatattcctaatttgaacaatatcgtaaagcgtgtgaaacacacctatactcaacgtggtttgagtgcaaaagatcgtcgtcagaatttaaaaaatgccttttctcttgctgttttgaaaaatgagtttccttatcgtcgtatagcattggtggatgatgtgattactactggttctacactcaatgaaatctcaaaattgttgcgaaaattaggtgtggaggagatccaagtgtgggggctggcgcgagcttaa

SEQ ID NO: 862 - protein, 228 aa, Haemophilus influenzae
MNFFNFRCIHCRGNLHIAKNGLCSGCQKQIKSFPYCGHCGAELQYYAQHCGNCLKQEPSWDKMVIIGHYIEPLSILIHRFKFQNQFWIDRTLARLLYLAVRDAKRTHQLKLPEAIIPVPLYHFRQWRRGYNQADLLSRQLSRWLDIPNLNNIVKRVKHTYTQRGLSAKDRRQNLKNAFSLAVLKNEFPYRRIALVDDVITTGSTLNEISKLLRKLGVEEIQVWGLARA

SEQ ID NO: 863 - DNA, 1290 bp, Haemophilus influenzae
ttgccattaatcgtttttgctaatcctaaaacagataacgaacgtttttttattcgtttatcgcaagcacctttagctcaaacactagagcaattagcttttcaacatgatgtcaatttagtgatgggtgagaggttagaaggcaatatttctttgaaattaaacaatattgatatgccacgtttgctaaaaataatcgcaaaaagtaagcatcttactttgaataaagatgatggagtttattatttaaacggcagccaatctggcaaaggtcaagttgcaggaaatcttacgacaaatgaaccacacttagtgagtcacacggtaaaacttcattttgctaaagcctctgaattaatgaaatccttaacaacaggaagtggatctttgctttctcccgatgggagcattacctttgatgatcgcagtaatttgctggttattcaggatgaacctcgttctgtgcaaaatatcaaaaaactgattgctgaaatggataagcctattgaacagatcgctattgaagcgcgaattgtgacaattacggatgagagtttgaaagaacttggcgttcggtgggggatttttaatccaactgaaaatgcaagacgagttgcgggcagccttacaggcaatagctttgaaaatattgcggataatcttaatgtaaattttgcgacaacgacgacacctgctggctctatagcattacaagttgccaaaattaatgggcgattgcttgatttagaattgagtgcgttggagcgtgaaaataatgtagaaattattgcaagtcctcgcttactcactaccaataagaaaagtgcgagcattaaacaggggacagaaattccttacatcgtgagtaatactcgtaacgatacgcaatctgtggaatttcgtgaggcggtgcttggtttggaagtgacgccacatatttctaaagataacaatatcttacttgatttattggtaagtcaaaattcccctggttctcgtgtcgcttatggacaaaatgaggtggtttctattgataagcaagaaattaatactcaggtttttgccaaagatggggaaaccattgtgcttggcggcgtatttcacgacacaatcacgaaaagcgaagataaagtgccattgcttggcgatatacccattattaaacgattatttagcaaagaaagtgaacgacatcaaaaacgtgagctcgtgattttcgtgacgccacatattttaaaagcaggagaaacgttagaggcgttgaaacaaaaaagtgcggggaaaaaataa

SEQ ID NO: 864 - protein, 429 aa, Haemophilus influenzae
MPLIVFANPKTDNERFFIRLSQAPLAQTLEQLAFQHDVNLVMGERLEGNISLKLNNIDMPRLLKIIAKSKHLTLNKDDGVYYLNGSQSGKGQVAGNLTTNEPHLVSHTVKLHFAKASELMKSLTTGSGSLLSPDGSITFDDRSNLLVIQDEPRSVQNIKKLIAEMDKPIEQIAIEARIVTITDESLKELGVRWGIFNPTENARRVAGSLTGNSFENIADNLNVNFATTTTPAGSIALQVAKINGRLLDLELSALERENNVEIIASPRLLTTNKKSASIKQGTEIPYIVSNTRNDTQSVEFREAVLGLEVTPHISKDNNILLDLLVSQNSPGSRVAYGQNEVVSIDKQEINTQVFAKDGETIVLGGVFHDTITKSEDKVPLLGDIPIIKRLFSKESERHQKRELVIFVTPHILKAGETLEALKQKSAGKK

SEQ ID NO: 865 - DNA, 102 bp, Haemophilus influenzae
atggaaaaaattaagtttttaaaggaagattatgaagaaatattttttaaagtgcggttattttttagtgtgtttttgtttgccattaatcgtttttgctaa

SEQ ID NO: 866 - protein, 33 aa, Haemophilus influenzae
MEKIKFLKEDYEEIFFKVRLFFSVFLFAINRFC

SEQ ID NO: 867 - DNA, 414 bp, Haemophilus influenzae
atgaaacattggtttttcctgattatattattttttatgaattgtagttggggacaagatcctttcgataaaacacagcgtaaccgttctcagtttgataacgcacaaacagtaatggagcaaacagaaataatttcctcagatgtacctaataatctatgcggagcggatgaaaatcgccaagcggctgaaattcctttgaacgctttaaaagtggtgggcgtagtgatttctaaagataaagcctttgccttgttgcaagatcaaggtttgcaaatttacattgttttagagggcgttgatgtggctcaagagggctatattgtagaaaaaatcaaccaaaacaatgttcaatttatgcgcaagctaggagagcaatgtgatagtagtgaatggaaaaaattaagtttttaa

SEQ ID NO: 868 - protein, 137 aa, Haemophilus influenzae
MKHWFFLIILFFMNCSWGQDPFDKTQRNRSQFDNAQTVMEQTEIISSDVPNNLCGADENRQAAEIPLNALKVVGVVISKDKAFALLQDQGLQIYIVLEGVDVAQEGYIVEKINQNNVQFMRKLGEQCDSSEWKKLSF

SEQ ID NO: 869 - DNA, 522 bp, Haemophilus influenzae
atgaaagctttttttaacgatccttttactccttttggaaaatggctaagccagcctttttatgtgcacggtttaacctttttattgctattaagtgcggtgatttttcgccccgttttagattatatagaggctagcacgcgttttgatgaaactgagtatgaattagctaaaaaaagttcagaattgttgcatcaacagaaaattttaacctctttacaacagcaatcggaaagtcgaaaactttctccagaactggctgcacaaattattcctttgaataaacaaattcaacgtttagctgcacgcaacggtttatctcagcatttacgttgggaaatggggcaaaagcctattttgcatttacagcttacaggtcattttgagaaaacgaagacatttttaaccgcacttttggctaattcgttacagctttcagtgagtcgcttgcagtttatcaaaccagaagacagcccgttgcaaaccgagattatttttcagctagataaggaaacaaaatga

SEQ ID NO: 870 - protein, 173 aa, Haemophilus influenzae
MKAFFNDPFTPFGKWLSQPFYVHGLTFLLLLSAVIFRPVLDYIEASTRFDETEYELAKKSSELLHQQKILTSLQQQSESRKLSPELAAQIIPLNKQIQRLAARNGLSQHLRWEMGQKPILHLQLTGHFEKTKTFLTALLANSLQLSVSRLQFIKPEDSPLQTEIIFQLDKETK

SEQ ID NO: 871 - DNA, 507 bp, Haemophilus influenzae
atgtcgatgaatttattgccttggcgtacttatcaacatcaaaagcgtttacgtcgtttagctttttatatcgctttatttatcttgcttgctattaatttaatgttggcttttagcaatttgattgaacaacagaaacaaaatttgcaagcgcagcaaacatcttttgaacaacttaatcagcaacttcacaaaactaccatgcaaattgatcagttacgcagtgcggtgaaagttggtgaagttttgacatctattcccaacgagcaagtaaaaaagagtttacaacagctaagtgaattaccttttcaacaaggagaactgaataaatttaaacaagatgccaataacttaagcttggaaggtaacgcacaagatcaaacagaatttgaactgattcatcaatttttaaagaaacattttcccaatgtgaaattaagtcaggttcaacctgaacaagatacattgttttttcactttgatgtggaacaaggggcggaaaaatga

SEQ ID NO: 872 - protein, 168 aa, Haemophilus influenzae
MSMNLLPWRTYQHQKRLRRLAFYIALFILLAINLMLAFSNLIEQQKQNLQAQQTSFEQLNQQLHKTTMQIDQLRSAVKVGEVLTSIPNEQVKKSLQQLSELPFQQGELNKFKQDANNLSLEGNAQDQTEFELIHQFLKKHFPNVKLSQVQPEQDTLFFHFDVEQGAEK

SEQ ID NO: 873 - DNA, 798 bp, Haemophilus influenzae
atgcaattctccctgaaaaattaccgcactttacaaatcggcattcatcgtaagcagagttattttgattttgtgtggtttgatgatctcgaacagccacaaagttatcaaatctttgttaatgatcgttattttaaaaatcgttttttacaacagctaaaaacacaatatcaagggaaaacctttcctttgcagtttgtagcaagcattcccgctcacttaacttggtcgaaagtattaatgttgccacaagtgttaaatgcgcaagaatgtcatcaacaatgtaaatttgtgattgaaaaagagctgcctatttttttagaagaattgtggtttgattatcgttctaccccgttaaagcaaggttttcgattagaggttactgcaattcgtaaaagtagcgctcaaacttatttgcaagattttcagccatttaatattaatatattggatgttgcgtcaaatgctgttttgcgtgcatttcaatatctgttgaatgaacaagtgcggtcagaaaataccttatttttatttcaagaagatgactattgcttggcgatttgtgaaagatctcagcaatcacaaattttacaatctcacgaaaatttgaccgcactttatgaacaatttaccgaacgttttgaaggacaacttgaacaagtttttgtttatcaaattccctcaagtcatacgccattaccagaaaactggcagcgagtagaaacagaactcccttttattgcgcttggcaacgcgctatggcaaaaagatttacatcaacaaaaagtgggtggttaa

SEQ ID NO: 874 - protein, 265 aa, Haemophilus influenzae
MQFSLKNYRTLQIGIHRKQSYFDFVWFDDLEQPQSYQIFVNDRYFKNRFLQQLKTQYQGKTFPLQFVASIPAHLTWSKVLMLPQVLNAQECHQQCKFVIEKELPIFLEELWFDYRSTPLKQGFRLEVTAIRKSSAQTYLQDFQPFNINILDVASNAVLRAFQYLLNEQVRSENTLFLFQEDDYCLAICERSQQSQILQSHENLTALYEQFTERFEGQLEQVFVYQIPSSHTPLPENWQRVETELPFIALGNALWQKDLHQQKVGG

SEQ ID NO: 875 - DNA, 2526 bp, Haemophilus influenzae
atgttgtatttccacctaaaatctgaattgccctcagtagaaacattaaaaaccgttgaattacaacaaccaatgcagatttatacggcagacggtaaattcattggcgaagtgggtgagcaacgccgtattccagtgaaattagccgatgtgccacaacgcttaattgacgcatttttagcgacggaagacagtcgtttttacgatcatcacggattagaccctatcggcattgcccgtgcattatttgtcgcagtgagtaatggcggtgcatcacaaggcgcaagtacgattactcaacaattagcgcgtaactttttcttaacctcagaaaaaaccattattcgtaaagcccgtgaagccgtgcttgcggtagaaattgaaaatactctcaacaaacaagaaatattagagctttatttaaacaaaatctttttaggctatcgttcttatggtgttgcagcggcagcacaaacctatttcggtaaatcattgaatgaattgaccttatcggaaatggcgattattgctggtttacctaaggcaccttcaacaatgaatccgctttattcgctaaaacgttcagaagaacgccgcaatgtggtgctaagccgtatgttagatgaaaaatacatcagcaaagaagaatatgatgctgcattgaaagagccgattgtggcgagctatcacggcgcaaaatttgaatttcgagccgattatgtcactgaaatggtgcgtcaagaaatggtgcgtcgttttggcgaagaaaatgcttacaccagtggttataaagtatttaccactgtactttcaaaagaccaagctgaagcccaaaaagctgtgcgtaataacttgattgattatgatatgcgtcacggttatcgcggtggcgcgccattatggcaaaaaaatgaagcagcttgggacaatgatcgcattgtcggttttctacgcaaactacctgattcagagccatttattcctgcggcagtgattggaattgcaaaaggcggtgctgatatattgctcgcttctggggaaaaaatgaccttatcaaccaatgcaatgcgttggacaggcagaagcaatcctgtgaaagtcggcgagcaaatttggattcgtcagcgtgctaatggggaatggcaattaggacaaattcccgcagcaaattcagcattagtttctcttaattcagataatggcgcgattgaagcagtggtgggcggatttagttatgaacaaagtaaattcaatcgagccacacaatctttagttcaagtgggttcttctattaaaccatttatttacgcggcagcattagaaaaaggcttaacgctttcaagcgtattacaagacagcccgatttctattcaaaaaccgggacaaaaaatgtggcaaccgaaaaactcgcctgatcgttatgatggtccaatgcgtttacgcgtaggattaggtcaatccaaaaatatgattgctattcgtgcgatccaaacggcaggtattgatttcacagcagaatttttacaacgttttggttttaaacgtgatcaatattttgcaagtgaagccttagcacttggcgcggcctctttcacgccattagaaatggcgcgagcttatgccgtgtttgataatggtggcttcctcattgaaccttatatcattgaaaaaattcaagataacacgggtaaagacttatttattgcaaaccctaaaattgcttgcattgaatgtaatgatatacctgtaatttatggcgaaaccaaagacaaaatcaacggctttgccaatattcctttaggcgagagtgccttaaaaccaacagatgacagcaccaatggcgaagaattagatcaacaacctgaaactgtacctgaactgccagaattacagtcaaatttcaccgcacttaaggaagatgcaattgatttaatggctgctgcaaaaaatgcttcgtcgaaaatagaatatgcaccacgtgtcattagtggcgaacttgcttttctcattcgtagtgccttaaatacagcaatttatggcgaacaaggtttagactggaaaggcaccagttggcgtatcgcacaaagcattaaacgtagcgatataggcggtaaaacaggtaccaccaacagttcaaaagtggcttggtatgcaggatttggtgcaaacttagtcactacaacttatgtcgggtttgatgataacaaacgtgtacttgggcgtggagaagcaggtgcaaaaacagccatgccagcttggatcacttatatgaaaacggctttgagtgataagccagaacgtaaattgccactgccgccaaaaattgtggaaaaaagcattgatactttgacaggtttgctttctccaaacggtggacgcaaagaatattttattgtgggaacagaaccgacacgtacctatctttcggaaatgcaagagcgtggttattacgttcctacagagttacagcaacgcttaaataatgaaggcaatacgccagcgacgcaaccacaagaactcttctaa

SEQ ID NO: 876 - protein, 841 aa, Haemophilus influenzae
MLYFHLKSELPSVETLKTVELQQPMQIYTADGKFIGEVGEQRRIPVKLADVPQRLIDAFLATEDSRFYDHHGLDPIGIARALFVAVSNGGASQGASTITQQLARNFFLTSEKTIIRKAREAVLAVEIENTLNKQEILELYLNKIFLGYRSYGVAAAAQTYFGKSLNELTLSEMAIIAGLPKAPSTMNPLYSLKRSEERRNVVLSRMLDEKYISKEEYDAALKEPIVASYHGAKFEFRADYVTEMVRQEMVRRFGEENAYTSGYKVFTTVLSKDQAEAQKAVRNNLIDYDMRHGYRGGAPLWQKNEAAWDNDRIVGFLRKLPDSEPFIPAAVIGIAKGGADILLASGEKMTLSTNAMRWTGRSNPVKVGEQIWIRQRANGEWQLGQIPAANSALVSLNSDNGAIEAVVGGFSYEQSKFNRATQSLVQVGSSIKPFIYAAALEKGLTLSSVLQDSPISIQKPGQKMWQPKNSPDRYDGPMRLRVGLGQSKNMIAIRAIQTAGIDFTAEFLQRFGFKRDQYFASEALALGAASFTPLEMARAYAVFDNGGFLIEPYIIEKIQDNTGKDLFIANPKIACIECNDIPVIYGETKDKINGFANIPLGESALKPTDDSTNGEELDQQPETVPELPELQSNFTALKEDAIDLMAAAKNASSKIEYAPRVISGELAFLIRSALNTAIYGEQGLDWKGTSWRIAQSIKRSDIGGKTGTTNSSKVAWYAGFGANLVTTTYVGFDDNKRVLGRGEAGAKTAMPAWITYMKTALSDKPERKLPLPPKIVEKSIDTLTGLLSPNGGRKEYFIVGTEPTRTYLSEMQERGYYVPTELQQRLNNEGNTPATQPQELF

SEQ ID NO: 877 - DNA, 846 bp, Haemophilus influenzae
atgctgagttatcgtcactcatttcacgcaggcaatcacgccgatgtcttaaaacatatcgttttaatgctcattttggaaaatcttaaactcaaagaaaaaggctttttttatttggatacgcactctggcgtggggcgttatcgtttatcctcaaatgaatcagaaaaaacgggggaatataaagaaggtattggacgcctgtgggatcaaacagatttacccgaagatattgctcgttatgtaaaaatgatcaaaaaactcaattatggaggcaaagaactacgttattacgcgggttctccattaattgccgcggaattgttgcgctcacaagatcgcgcactattgaccgagcttcatcctagcgattatccaatacttcgcaataattttagcgacgacaaaaatgtcaccgtaaaatgtgacaatggttttcaacaagtcaaagcaacgcttccgccaaaagaacgccgaggcttagtactaatcgatccgccttatgaattaaaagatgattatgatctcgttgttaaagccattgaagagggctataaacgttttgccactggcacttatgcgatttggtatcctgttgtattacgccaacaaactaaacgtatttttaagggtttagaagcaacgggaattagaaaaattctaaaaattgagctctctattcgccctgatagcgatcaacgaggaatgactgcgagcggtatggtggtaattaatccaccttggacattagaaacccaaatgaaagaaattttgccttatctcacaaaaacattagttccagaaggtactggaagctggacagtcgaatggattacaccagagtga

SEQ ID NO: 878 - protein, 281 aa, Haemophilus influenzae
MLSYRHSFHAGNHADVLKHIVLMLILENLKLKEKGFFYLDTHSGVGRYRLSSNESEKTGEYKEGIGRLWDQTDLPEDIARYVKMIKKLNYGGKELRYYAGSPLIAAELLRSQDRALLTELHPSDYPILRNNFSDDKNVTVKCDNGFQQVKATLPPKERRGLVLIDPPYELKDDYDLVVKAIEEGYKRFATGTYAIWYPVVLRQQTKRIFKGLEATGIRKILKIELSIRPDSDQRGMTASGMVVINPPWTLETQMKEILPYLTKTLVPEGTGSWTVEWITPE

SEQ ID NO: 879 - DNA, 96 bp, Haemophilus influenzae
gtgcattctagcgaaaaaatgggcttttgggaactgtgggatttatttaaaatcttagaaaatcttaccgcacttttaagctataaagtgcggtga

SEQ ID NO: 880 - protein, 31 aa, Haemophilus influenzae
MHSSEKMGFWELWDLFKILENLTALLSYKVR

SEQ ID NO: 881 - DNA, 330 bp, Haemophilus influenzae
atgtttggaaaaggcggtttaggcggcttaatgaaacaagcccaacaaatgcaagaaaaaatgcaaaaaatgcaagaagaaatcgcgcaactagaagtaacgggtgaatctggtgcaggtttagtgaaaatcacaattaatggtgcacataactgccgccgcattgacattgatccttctttaatggaagacgataaagaaatgttagaagatttaatcgcagctgcttttaacgatgcggtgcgtcgtgcagaagaattacaaaaagaaaaaatggcatcggttactgctggaatgccattaccaccaggaatgaagtttccgttttaa

SEQ ID NO: 882 - protein, 109 aa, Haemophilus influenzae
MFGKGGLGGLMKQAQQMQEKMQKMQEEIAQLEVTGESGAGLVKITINGAHNCRRIDIDPSLMEDDKEMLEDLIAAAFNDAVRRAEELQKEKMASVTAGMPLPPGMKFPF

SEQ ID NO: 883 - DNA, 603 bp, Haemophilus influenzae
atgcaaagcagcccacttttagaacaccttattgaaaacttacgttgtcttccaggcgtagggcctaaatctgcgcaacgtatggcttatcatcttttacagcgtaatcgtagcggtggaatgaatttagctcgagcactcacagaagctatgtctaaaattggtcattgttcacaatgtcgagactttacggaagaagacacttgcaacatttgcaataatccacgccgtcaaaattcaggtttgctttgtgtcgttgaaatgccagctgatattcaagcgattgagcaaacggggcaattttcaggacgttattttgttttaatgggacatttgtctccacttgatggtattggacctcgtgaaattggcttagatttactgcaaaaacgcttagtagaagaatctttccacgaagtgattcttgcaacaaatccaacggtggaaggcgatgctacagcaaactacattgctgaaatgtgccgccaacacaatattaaagtgagtcgtatcgctcacggtatccctgtcggtggtgaactggaaactgtggacggcacaacgcttactcactcttttctaggtcgtcgtcaaatcgactaa

SEQ ID NO: 884 - protein, 200 aa, Haemophilus influenzae
MQSSPLLEHLIENLRCLPGVGPKSAQRMAYHLLQRNRSGGMNLARALTEAMSKIGHCSQCRDFTEEDTCNICNNPRRQNSGLLCVVEMPADIQAIEQTGQFSGRYFVLMGHLSPLDGIGPREIGLDLLQKRLVEESFHEVILATNPTVEGDATANYIAEMCRQHNIKVSRIAHGIPVGGELETVDGTTLTHSFLGRRQID

SEQ ID NO: 885 - DNA, 1956 bp, Haemophilus influenzae
atgcgtttatttatcgccgaaaaaccaagcctagctcgtgctattgctgacgtgctccctaagcctcatcaacgtggggatggttttattaaatgtggcgataatgatgtggtaacttggtgtgtagggcatttgctcgagcaagcagaacccgatgcctatgatcctaaattcaaacaatggcgtttagaacatctcccaatcattcctgaaaaatggcaacttttaccacgaaaagaagtaaaaaaacagctttctgtggtggaaaaactaatccatcaagcggatacacttgttaatgcaggagaccctgatagagaagggcaattacttgtagatgaagtgttcagttatgccaatttatctgccgaaaaacgcgataaaattttacgctgcttgattagcgacctaaatccaagtgcggtagaaaaagcggttaaaaaattacaacccaaccgtaattttattcctcttgccacatccgcactcgcacgagcccgcgctgattggctttatggcattaatatgaccagagcttataccattcgaggcagacaaactggctatgatggcgtgctttctgttggacgagtgcaaacccctgtgctaggtttaattgtacgtcgagatttagaaattgagcatttccagcccaaagacttctttgaagtacaggcttgggttaatccagagagcaaagaagaaaaaactccagaaaaatcaaccgcacttttcagcgccttatggcaacccagcaaagcttgtgaagattaccaagatgatgacggcagggtgctctctaaaggattagctgaaaacgttgtaaaacgtattacaaatcaacctgcagaagtaaccgaatacaaagatgttcgtgaaaaagaaacggcacctttgccttattccctttctgcgttacaaattgatgcagcaaagcgattcggtatgtctgctcaagccgtattagatacgtgccaacgcctatatgaaactcatcgtttgattacttatccgcgttctgattgtcgctatttgcccgaagaacattttgctgaacgacacaatgtattaaatgcaatttcaacccattgtgaagcttatcaacgcttaccaaatgtcatttcaactgaacagagaaatcgctgttggaatgataaaaaagtagaagctcaccatgcaatcattcctactgccaaaaatcgtccagtaaatctaacacaagaagaacgaaatatttacagccttatcgctcgccaatatttaatgcaattttgccctgacgcagaatatcgtaaaagtaaaatcacattaaatatcgctggcggtacttttatagctcaagcacgaaatttacaaacggctgggtggaaagaattgttaggcaaagaagacaacacagaaaatcaagaacccttattaccaatagtaaagaaaggacaaattttgcattgtgaacgcggagaagtgatgagtaaaaaaactcagccgccaaagcctttcacggatgcaaccttgctttccgcaatgacgggcattgcacgatttgtacaggataaagaactcaaaaaaatcttgcgagaaaccgatggattgggtacagaggctactcgcgctggcatcattgaattactttttaaacgcagttttttaactaaaaaagggcgaaatattcacagtacagaaactggaagaattttaattcaggcattaccagatattgccacccaaccagatatgacggctcattgggaatcgcaactcacagacattagtcaaaaacaagcaacctatcaacaatttatgcataacttgaatcaaatgttgcctgatttagtccgttttgtagatcttaatgcattaagacaattaagccgcattaaaatgattaaatccgatagagcgaaacctaaaagtgcggtaaaaaaatcgagtaaatcaaacggtgaaactgattaa

SEQ ID NO: 886 - protein, 651 aa, Haemophilus influenzae
MRLFIAEKPSLARAIADVLPKPHQRGDGFIKCGDNDVVTWCVGHLLEQAEPDAYDPKFKQWRLEHLPIIPEKWQLLPRKEVKKQLSVVEKLIHQADTLVNAGDPDREGQLLVDEVFSYANLSAEKRDKILRCLISDLNPSAVEKAVKKLQPNRNFIPLATSALARARADWLYGINMTRAYTIRGRQTGYDGVLSVGRVQTPVLGLIVRRDLEIEHFQPKDFFEVQAWVNPESKEEKTPEKSTALFSALWQPSKACEDYQDDDGRVLSKGLAENVVKRITNQPAEVTEYKDVREKETAPLPYSLSALQIDAAKRFGMSAQAVLDTCQRLYETHRLITYPRSDCRYLPEEHFAERHNVLNAISTHCEAYQRLPNVISTEQRNRCWNDKKVEAHHAIIPTAKNRPVNLTQEERNIYSLIARQYLMQFCPDAEYRKSKITLNIAGGTFIAQARNLQTAGWKELLGKEDNTENQEPLLPIVKKGQILHCERGEVMSKKTQPPKPFTDATLLSAMTGIARFVQDKELKKILRETDGLGTEATRAGIIELLFKRSFLTKKGRNIHSTETGRILIQALPDIATQPDMTAHWESQLTDISQKQATYQQFMHNLNQMLPDLVRFVDLNALRQLSRIKMIKSDRAKPKSAVKKSSKSNGETD

SEQ ID NO: 887 - DNA, 342 bp, Haemophilus influenzae
atgtatcaagttcttttatttatttatgttgttgtcgcgattgccttgatcgggtttattctcgttcaacaaggtaaaggggcgaatgcgggtgcatcttttggtggtggtgcatcaggtacaatgtttggctctgctggtgcaggtaactttttaacacgtactagtgcgattttagcaaccgcattttttgttattgctcttgttttaggtaatatgaattcacataaaggcaatgttcaaaaaggtacttttgacgatttatcacaagctgcagagcaagttcagcaacaacaggcagctccagcgaaagacaataaaaatagcgacatcccacaataa

SEQ ID NO: 888 - protein, 113 aa, Haemophilus influenzae
MYQVLLFIYVVVAIALIGFILVQQGKGANAGASFGGGASGTMFGSAGAGNFLTRTSAILATAFFVIALVLGNMNSHKGNVQKGTFDDLSQAAEQVQQQQAAPAKDNKNSDIPQ

SEQ ID NO: 889 - DNA, 1227 bp, Haemophilus influenzae
atggctagaatagtaaaacctttatctccgactgaaatcaaaaatgctaaaccaaaagagaaagaatataccctatctgatggtgagggcttattgctgctaatcttacctagtggttctaaaagctggcgatttaactacgctagaccactcactgggaaaagaacaaaaatggccttaggcggttatccagaattatcattatcagatgctcgtgctaaacgtgaagaatatcgtgtattacttgcgaaaggtatcgatccacaagaagaaaaaatacgcatccaacaagaatatgaaaaccgtttaaaagatactttccattctgttgcagaaagttactttaatggtatttacaaagaaaaagctaaaaatccagaaacacgagaaaagaattgggaacgattgaaaaatcatatcttcccttatattggcgataagcatgtatcagaaataaaagtaaaagagttagttagcatttatgaaaaaatagcagatagaagtaacacgctcaaaaaaatacatcagcttgtcggtgccattatggatcatgcgataacaaaaggtatcatagaaagtcataactgcagattggccgtgaaaaacttctatataaaatcatctacgccacatcccactattaaacttgatgaactctcaaaattattccaagacttagaaaatgctcgtatagggaaaaaaacctatttattaatttgttggtcattcttaacggcattacgcccaaaagaggcggtaaatgcggaatggtcagaaattgattttgataacaagttgtggaatatccccaaagaaaaaatgaaaggacaagcagataaaaaacgaccgcatactgtgcctttatcttcacaagcaattcagctgttagaagtgatgaaactgttttctgaaaatagttcttttgtttttgctggtcgctcatcaaaaaatcaacccatgaataaagcaaccgtaaatgttgctctaaaacatatcggctataaagataaattaactgctcacggcatccgtgcgtttattaaaacattcttagcctctcataaagttgaacgcaatgtatctgaaactattctctctcatttattagaaggcggggacgatttagaaaatacttacaatcgatataattatttagaagaaagaaaacctgtgatgcagcttatcggtgattattgtgaatcttgcggaatgaacttgaatttataa

SEQ ID NO: 890 - protein, 408 aa, Haemophilus influenzae
MARIVKPLSPTEIKNAKPKEKEYTLSDGEGLLLLILPSGSKSWRFNYARPLTGKRTKMALGGYPELSLSDARAKREEYRVLLAKGIDPQEEKIRIQQEYENRLKDTFHSVAESYFNGIYKEKAKNPETREKNWERLKNHIFPYIGDKHVSEIKVKELVSIYEKIADRSNTLKKIHQLVGAIMDHAITKGIIESHNCRLAVKNFYIKSSTPHPTIKLDELSKLFQDLENARIGKKTYLLICWSFLTALRPKEAVNAEWSEIDFDNKLWNIPKEKMKGQADKKRPHTVPLSSQAIQLLEVMKLFSENSSFVFAGRSSKNQPMNKATVNVALKHIGYKDKLTAHGIRAFIKTFLASHKVERNVSETILSHLLEGGDDLENTYNRYNYLEERKPVMQLIGDYCESCGMNLNL

SEQ ID NO: 891 - DNA, 1770 bp, Haemophilus influenzae
atggctaaattaatcaatgcaccgcaccttgcagatcaaattcatgaaccttactctgatatttttattcttgctgggcgtaaagcctggcaagcattggataacggaaagggtcaagagtggctcttgttatgttctttaattcacggattagatagaaatataaaaccagttattcttgcagaaaaacagttagagaatatttcatctattcgcatagtcaaagaagatcaacaatcagtaaaacttgttcaatatggtgagctggcgcaagctgaaataacggctatttgccaaaacttagctaaaaactctgatgcaatagatgtcaaacttcttgatgctgcagcgcagactaaagaagatttaagtgcttatattcaacgcttacgcaatgataaagagacagcagacctcgcagagcaattagcaccgccagagaaactaaaagaaaaagacggaacgaacaaaaaatcacgagcctttcaaaagtggttaaatttagatatggcactacagcgtggttgcagagaaatctatgcttatgatggcaaaacgtggaataaacaagaaaatgatgacttggaagagaaggcagttaaatttcttgatgaaaatgaatttaactatagcgattctacaatagagcggttaatcaagacattaaaagcccaattgccaagaatgggagaaatgtctaacgatttgatagcctttgagaatggcgtgttaaatcgcaatacaatggaatttgaatcgcataatcggcaaaactggctaacctcttgtattcctcataagtatgataaacaggcgacagatacgccactctttgacaaatggttgagctttgtatctgatggaaacaaagataaagcaagaaacattctagctgttttatatgcaatcttaaccaatcgttataactggcaaatgttctttgaaattacaggaaaggggggaagtggtaaatctgtgtttgccagtatcgctactttattggctggtgtaaaaaacactgcatcaagtaatttagaaaagtttgatgatgaacgcggactatctggacttgaaaataaaacgctgattttatgccctgaacaatcaaaatatgctggagacggcagcggtttaaaatctatcactggcggggatactgtaagggtgagatataattatcaagatccatttgatgtaaaaatcaccgccctagttatgttgataaataatagaccttgttcatttacagagcgttctggtggggttgatcgaagacgtgttatttttgacttcaaaaagatagtaccagaagatgaacgcgatccgcattttatggataaaatcactctagaagtgggcggaattattcgcaaggtgtttgattcattccatgatccaaatgatgcgaaaaaggctttaaaagcacaaatggaaagccaagaggccttagaagtaaaaaaactatctgatccacttacagacttctttggttatttctacacgacagagcaaacagatgggctttttattggtgttacaaacatgggattagacaaaataaggacgcacctttacccagcatatttagcctatacaaaggcgatgaatatcggtgaattagggctgaacaattttgtaattggggttgagcaagccttaaaacagaatggcaataaacatgatttcatgaagagacataccaaaactggacgcaggacaaatatccattttaaggattttgatagttttcgaaatgaaatgtttagttaa

SEQ ID NO: 892 - protein, 589 aa, Haemophilus influenzae
MAKLINAPHLADQIHEPYSDIFILAGRKAWQALDNGKGQEWLLLCSLIHGLDRNIKPVILAEKQLENISSIRIVKEDQQSVKLVQYGELAQAEITAICQNLAKNSDAIDVKLLDAAAQTKEDLSAYIQRLRNDKETADLAEQLAPPEKLKEKDGTNKKSRAFQKWLNLDMALQRGCREIYAYDGKTWNKQENDDLEEKAVKFLDENEFNYSDSTIERLIKTLKAQLPRMGEMSNDLIAFENGVLNRNTMEFESHNRQNWLTSCIPHKYDKQATDTPLFDKWLSFVSDGNKDKARNILAVLYAILTNRYNWQMFFEITGKGGSGKSVFASIATLLAGVKNTASSNLEKFDDERGLSGLENKTLILCPEQSKYAGDGSGLKSITGGDTVRVRYNYQDPFDVKITALVMLINNRPCSFTERSGGVDRRRVIFDFKKIVPEDERDPHFMDKITLEVGGIIRKVFDSFHDPNDAKKALKAQMESQEALEVKKLSDPLTDFFGYFYTTEQTDGLFIGVTNMGLDKIRTHLYPAYLAYTKAMNIGELGLNNFVIGVEQALKQNGNKHDFMKRHTKTGRRTNIHFKDFDSFRNEMFS

SEQ ID NO: 893 - DNA, 351 bp, Haemophilus influenzae
atgagtaaaaccgcttttgttttaactgctggcgttcatgtttttgagggttcttttatgccgattgttattgcaatgcgagaaagcaaagaggctattttagaacttcatcgcacctataccctgcaggggaaacttacgaatatcagagccattaatttaaatcattacacgctagagattagcttaggcaatgcacgtgcgcctattattcacgcagagggaaaaagagaacgtgcggaggctgaggaggcgatagctcctttcaaaacactctaccctaccgctcaaattcgagtgattcagttcaaggacgcatttttatttaagcaatgcgcaggattggattag

SEQ ID NO: 894 - protein, 116 aa, Haemophilus influenzae
MSKTAFVLTAGVHVFEGSFMPIVIAMRESKEAILELHRTYTLQGKLTNIRAINLNHYTLEISLGNARAPIIHAEGKRERAEAEEAIAPFKTLYPTAQIRVIQFKDAFLFKQCAGLD

SEQ ID NO: 895 - DNA, 639 bp, Haemophilus influenzae
atgaaaccaagtaacccaatgcaacaacttcaacagtggaagaaaaacaacgagcaaagaaagataaatcagttcgtgaatgaaatgaaccgcactaagaatttagcaagcgatagtggggtatcaggcaacggcgtacaccctaacaagctcaaaattgagctggttaaaaactgcgaaagtgcgaaacaaattgtgaaagtacagaatgtaaatttgcattctgagcaaaatacgcaaggaaacgcacgtagcgaggctaaaagcaaatatcaagggaaactctacgcgaatccattagcctttaaattcgcccagcttacgcgccaattcaaactaattttggacagcaatcgcaagtgtttagaagtttaccccgatgattttcatcataagctcaaaatgcgtgatgaaatgatggacttaatcgaccgattgaaagcgggtggcaagctctttaatgcactggctaaatctcaagggggaacattttgccgggataatcaagctaccctaaaagacttcaatcaggctaacggttatctaatccataagtttggcgaggtagtggctcaaattgagcgactaaatattgaacgagttgagggcgagaaattacagggggcgagcaatgagtaa

SEQ ID NO: 896 - protein, 212 aa, Haemophilus influenzae
MKPSNPMQQLQQWKKNNEQRKINQFVNEMNRTKNLASDSGVSGNGVHPNKLKIELVKNCESAKQIVKVQNVNLHSEQNTQGNARSEAKSKYQGKLYANPLAFKFAQLTRQFKLILDSNRKCLEVYPDDFHHKLKMRDEMMDLIDRLKAGGKLFNALAKSQGGTFCRDNQATLKDFNQANGYLIHKFGEVVAQIERLNIERVEGEKLQGASNE

SEQ ID NO: 897 - DNA, 207 bp, Haemophilus influenzae
atgaaagctaaaaaaatcaaagcattcaaagaaccatatacatcgacacccgagcagctagagaaatcttgtaaacggattaaacaattcttagcctttgcagaagattatctacactctggacactacaaaggattggcggcatcaatcgaacaaatcaagaaagcagcaacaattagaaaggtggcacaacatgaaaccaagtaa

SEQ ID NO: 898 - protein, 68 aa, Haemophilus influenzae
MKAKKIKAFKEPYTSTPEQLEKSCKRIKQFLAFAEDYLHSGHYKGLAASIEQIKKAATIRKVAQHETK

SEQ ID NO: 899 - DNA, 201 bp, Haemophilus influenzae
atgatgattaaaccgaacctaccctatcaattaatctttgtttatgacaatggcgaccaattcatagagggagaatatggcacgcttagagaggcgttacaggcaaaaatcaaatgtaagcacgaaataggacaagctgatatttgcggtcgagtgttagaagtgatcacgattttgaagggggaagaaaatgaaagctaa

SEQ ID NO: 900 - protein, 66 aa, Haemophilus influenzae
MMIKPNLPYQLIFVYDNGDQFIEGEYGTLREALQAKIKCKHEIGQADICGRVLEVITILKGEENES

SEQ ID NO: 901 - DNA, 372 bp, Haemophilus influenzae
atgtttaatcaatcaattttatctgcacttcaagtgatggcggactttaacgacattaacaactataagcaaatccctataccaatgagtaaggaaaaattaacagacttacgcagtgaatctgaaaatctttgcgaatctatcgaatatggcttaatgcacttaggcgacttaatgcaaaccctaggcaatcttgccgacacagagcaggattttacacgggaggcaatgagtaacgataacgtgaaacatatcgggggattaatcaaggcaaacgcctatcttctcaatgcgttaagagaaaccgccagcttaagcgaatattatcttgctggtggcttagatggggagattgaaagaaatgatgattaa

SEQ ID NO: 902 - protein, 123 aa, Haemophilus influenzae
MFNQSILSALQVMADFNDINNYKQIPIPMSKEKLTDLRSESENLCESIEYGLMHLGDLMQTLGNLADTEQDFTREAMSNDNVKHIGGLIKANAYLLNALRETASLSEYYLAGGLDGEIERNDD

SEQ ID NO: 903 - DNA, 930 bp, Haemophilus influenzae
atgaactcaaaacatagttattttatacaatttacaaaaaatttcaatatttccgctttacaaagtgcggtcaattttgctaaagttttcgcgcagtcgcaaaaaacgactgccagccgtgagaagctgaactatttacatcaggcgaacgatagcacgccttttaaccgtgctttttttattcgtaacattcgcacacctcaaagcaatgcggattttgttttcaatctaaatccgatcattctctcaatggtagagcgtaatgagcagtctttgactggctgtcttccatatgtggcagttttccaccttgttacgttctaccgcccgaccgtggaaagtctagcggtagttcttgaaaacaaacatatggaacttacgcaaatgtatcaattcatttttgcgcttattcgcgcacctcaaatcaaaattagacttcttgccgatactgaacaacaagcacgctcacgttttactgatggcgataccttgttattcgttggcagaatcaaccaaaacccactcaaaaacaaccgcacttcttcaatttatggaaataatcacagcttgccgaaatgtgaagatgcaggtagtattgaaagcactactacacgaaagggcaaccgcaacccttatcaatgcggtatttttttacctaaaattcattccttgcacgttcctgaaaaatcgggtgcgttgtcttatatcgaatttgcggtacggttgagagatcgaaataaggctttaagcacgaatcagatccgctcttttcgtggagtagttgagaccgtatcgcaccctatgggcgatacttccaaaaatactaaacacggaaatccaacaatgaaaatctaccccaaaaataaccgcactttagcgacatttcctaccctttctgtacctgtaacacaagggggcgcaaatgtttaa

SEQ ID NO: 904 - protein, 309 aa, Haemophilus influenzae
MNSKHSYFIQFTKNFNISALQSAVNFAKVFAQSQKTTASREKLNYLHQANDSTPFNRAFFIRNIRTPQSNADFVFNLNPIILSMVERNEQSLTGCLPYVAVFHLVTFYRPTVESLAVVLENKHMELTQMYQFIFALIRAPQIKIRLLADTEQQARSRFTDGDTLLFVGRINQNPLKNNRTSSIYGNNHSLPKCEDAGSIESTTTRKGNRNPYQCGIFLPKIHSLHVPEKSGALSYIEFAVRLRDRNKALSTNQIRSFRGVVETVSHPMGDTSKNTKHGNPTMKIYPKNNRTLATFPTLSVPVTQGGANV

SEQ ID NO: 905 - DNA, 312 bp, Haemophilus influenzae
atgaacgaagcaagaaaaccaacacaattcttgaaagtgttacaccgtttaattttttctagcattagcggcatcgatggttactcaatgggcatgacgtcagcgcgtaactatatcagtgaacttgaacgcaatcatttaaccggcaaagtgaaacgtacaacggaaaagactgcggatggaatggggcaatattaccgctatgaaatcgcagatgccgaacagttaaaacaggtgattgccatttacaaggctaagggaggtgagcttactgcgcatgaagaacagcaagcctactttcgattccgttaa

SEQ ID NO: 906 - protein, 103 aa, Haemophilus influenzae
MNEARKPTQFLKVLHRLIFSSISGIDGYSMGMTSARNYISELERNHLTGKVKRTTEKTADGMGQYYRYEIADAEQLKQVIAIYKAKGGELTAHEEQQAYFRFR

SEQ ID NO: 907 - DNA, 210 bp, Haemophilus influenzae
atgagcaaaacagaaaacttaaaccctcaacaaaaactaatctccggtgaaatcgcttgccatattgttggctttggtcgcaccaaactcaacgagcttgtaaaagctaaacaattcccacaaccgatccgcttttcacaaaactttgtccgttgggacttagaagaagtgaatgcgtggattgaagaacaaaaagccgcacgtgcttaa

SEQ ID NO: 908 - protein, 69 aa, Haemophilus influenzae
MSKTENLNPQQKLISGEIACHIVGFGRTKLNELVKAKQFPQPIRFSQNFVRWDLEEVNAWIEEQKAARA

SEQ ID NO: 909 - DNA, 963 bp, Haemophilus influenzae
atggaacttttaccactcgattattattcattaaatcaatcggtcgattttatcaatcaaagaactaattcagctataaaggaaaatcttttatattcttatgcgattgaagaaaaaataagatttttattacaaattgagattaaagacaatcaattagtaaaaataggcagaaatgagtcagaaggattttttatttctgatgattctgaaatttattttaaagaacgatccatagagtgcgaagataaaatcggtttacatttaaaagattgctcatcctctcttagtattgttcataataatgaaataactcttgatggagatgatttatacttatctttcaataaagcaaaaataacagaatataaaggatatattgttttacatcctgagttattagatctattttgtaatcagtctttaccacagcacggagtgaaaaatacaaattatttattattagatgaatttaatgtccaaacgccttttgaagctgatattttcacttcttttaattttagaatggaatatccaaaatataatgaagatgaaaggttatatataaaacatactttcagagttaattttagtgatataaaaatcagttatgatgatttaataaaactatttccttctgaaaatgcgtggagagaacaagcgaatttaaaacaagaaatagccaaattaaaaacagagatactagataaagaagcagaaaataatcagttaaagcagcagataagcgagcaaaacagccctattctattaggcgtacaccgcaatgatgatttattaaagattgccattgaagttcgcaataaatactgggcggattatcccgaaaatgtaaaatctaacgcacaaataagagattacattatacgagagtatggcgtggcaagaaccaccgcagaagaaatagaaaaaatcgcttgccctatcaacagaaagaaaaattag

SEQ ID NO: 910 - protein, 320 aa, Haemophilus influenzae
MELLPLDYYSLNQSVDFINQRTNSAIKENLLYSYAIEEKIRFLLQIEIKDNQLVKIGRNESEGFFISDDSEIYFKERSIECEDKIGLHLKDCSSSLSIVHNNEITLDGDDLYLSFNKAKITEYKGYIVLHPELLDLFCNQSLPQHGVKNTNYLLLDEFNVQTPFEADIFTSFNFRMEYPKYNEDERLYIKHTFRVNFSDIKISYDDLIKLFPSENAWREQANLKQEIAKLKTEILDKEAENNQLKQQISEQNSPILLGVHRNDDLLKIAIEVRNKYWADYPENVKSNAQIRDYIIREYGVARTTAEEIEKIACPINRKKN

SEQ ID NO: 911 - DNA, 228 bp, Haemophilus influenzae
atgaaagccaaaaagcctataaaaagtaatatggctaaaaataacaaaaaatctaaagcagaaaatacaaatgaaccaaatgtggataaaactgatttaatcattcttcccgcccctttgtcgccctgtttatttcttgctctattttatcaaagtttaaatgcggtaagctacgtttatttcttatttttgtgcttagattataataacttcgctacaaaattgtag

SEQ ID NO: 912 - protein, 75 aa, Haemophilus influenzae
MKAKKPIKSNMAKNNKKSKAENTNEPNVDKTDLIILPAPLSPCLFLALFYQSLNAVSYVYFLFLCLDYNNFATKL

SEQ ID NO: 913 - DNA, 285 bp, Haemophilus influenzae
atgagatgtaaacaggcaaagcaaaacttacttctttcagcggtgaatcactataaaaaatcgaccgcactttttacctttgtcagcctttacgatgatgaagaaccctatgcaataagtgaagttattcacgcattaaaatgtaaatgtaatgctgcaaaacgtgaaatagatagcaggcagaatagccctaatatggaagtgttagaaacaatttaccatatcgcgcacaaaaatcttgaagatatgaagaaggcagaaagaagaattgcgaaaagaagataa

SEQ ID NO: 914 - protein, 94 aa, Haemophilus influenzae
MRCKQAKQNLLLSAVNHYKKSTALFTFVSLYDDEEPYAISEVIHALKCKCNAAKREIDSRQNSPNMEVLETIYHIAHKNLEDMKKAERRIAKRR

SEQ ID NO: 915 - DNA, 1668 bp, Haemophilus influenzae
atggaaatctggcacgaatacgcgaagaaagttcaatcaggtgaaatagtggcttgtcgtaagataaaacaagccgtagcgcgttattttgacgatttagcgaaccccgcttatttctttgatgaaagtgcggtaaataaattcttggctttctcccgcctatgcccgcacgttaaagggcatttacgcgggcaaccaatcgagctttcagactggcagacgtttctattcgctaatctgttaggctttaagcgcaccgataccggactgagaaaatatcgttccgcttatatccaagtggcgcggaaaaatgccaagtccaccgtggccgccgtgttggctaattggttcctactgatggaatcgggccaacaagatatttacacggcagcagtaagccgagaccaagcccgcattgtgtttgatgatgcgcgtcaaatgtgcctactttccccgccgttgcgcaaacggctcaatattcagcagcataaactgattaatccgaaatcaaatagcctaatgcgcccgctggcggctaaatcctcaaccattgagggaaccaacccaagcctcgccattgtggacgaataccacctacacactgataacagcgtttacagcgcattagaactagggcaaggcgcacgcccggaaggtttactgtttgccattaccacagcaggaagtaacgttatttccgcttgtaagcagcactatgattattgtgcccaaatcttagaagggaatgagcagaatgacagcttattcgtactgatttttgaactggacgaagaaagcgaaattgataatccggaaaactggataaaagccaatccgaatatcggtaaatccattccttaccttgattttgaaaacacaatcaagaaagcccgagggattccttccgagtgggtggaaatgcttaccaagcgttttaatgtttggtgccaaggaacaacgccatggctaggtgaaggcaattgggcgcagtgcgcacgaaattacacggaaagcgacttacttcaccaagattgctatttaggcttggatttatctagcaccaacgacttaacaagcctttgttacaccttcccacaagggaaaaaagtgcggttgattacccggcattatattcctgaatttcagcttaacaatgtggccaacaagaaccgggctatttatcgaaactgggtgcgccaagggtggctaattgccacagagggcgactgtatcgactatgacaaaatccgcgatgatattttaaaagacgcggaaaacttcaatatcaaaatgatcggctttgatgtttggaacgccacgcatttacgcacgcaattacaggcagcaggcttggaagtagaaccattcccgcaaacctatcaacgatttagcccggtggctaaaagtgcggaagtattgataaatcgccaagtgatagaacataacggcgatccggtgctttcgtgggcattatcccatgttgtgatggaaaccgatgcgaacgccaacataaaaccaaataagaagaaggccgcaaacaaaatcgatccggcagtagctttcttgatgtcattcggcacttatcaacttgaatatggcgatctgatttttgagttatcggaagaacacaaacaggcattggaacaatttaacgggattgatttatga

SEQ ID NO: 916 - protein, 555 aa, Haemophilus influenzae
MEIWHEYAKKVQSGEIVACRKIKQAVARYFDDLANPAYFFDESAVNKFLAFSRLCPHVKGHLRGQPIELSDWQTFLFANLLGFKRTDTGLRKYRSAYIQVARKNAKSTVAAVLANWFLLMESGQQDIYTAAVSRDQARIVFDDARQMCLLSPPLRKRLNIQQHKLINPKSNSLMRPLAAKSSTIEGTNPSLAIVDEYHLHTDNSVYSALELGQGARPEGLLFAITTAGSNVISACKQHYDYCAQILEGNEQNDSLFVLIFELDEESEIDNPENWIKANPNIGKSIPYLDFENTIKKARGIPSEWVEMLTKRFNVWCQGTTPWLGEGNWAQCARNYTESDLLHQDCYLGLDLSSTNDLTSLCYTFPQGKKVRLITRHYIPEFQLNNVANKNRAIYRNWVRQGWLIATEGDCIDYDKIRDDILKDAENFNIKMIGFDVWNATHLRTQLQAAGLEVEPFPQTYQRFSPVAKSAEVLINRQVIEHNGDPVLSWALSHVVMETDANANIKPNKKKAANKIDPAVAFLMSFGTYQLEYGDLIFELSEEHKQALEQFNGIDL

SEQ ID NO: 917 - DNA, 369 bp, Haemophilus influenzae
atgacgaaacgaactaaatataaagcccccgatttcttagacgaactggctaaaagccaatggaaagcacgcattacgcagctttcgtatcgtggcgatattaaaccggaagatttaaccaatcttgaaatctactgtattaattattcactattccgaagtgcggtagcggatattgcgaaaaacggcttttccattgtaaacagccagggtacacagtcacgcaatccggcactttcagcgaaagccgatgcggaaaaagtgatgatcaagatgtccgcacttttgggctttgacccggtaagtcgccgtaaaaatccagtagaaacggacgttactgatatgttggatgaaatcctcacaatgtag

SEQ ID NO: 918 - protein, 122 aa, Haemophilus influenzae
MTKRTKYKAPDFLDELAKSQWKARITQLSYRGDIKPEDLTNLEIYCINYSLFRSAVADIAKNGFSIVNSQGTQSRNPALSAKADAEKVMIKMSALLGFDPVSRRKNPVETDVTDMLDEILTM

SEQ ID NO: 919 - DNA, 222 bp, Haemophilus influenzae
cccctttgtgtgatgtgcttagagcaaggcaaatatactccggcaacagtgatagaccatatcaagccggtagagaacgggcaagccgatccgttgttttgggtagcaagcaatcatcagcctttatgtcgtgattgtcacagctataaaacacgagtgatagaccaacgcggatttggtgcgaagaaagacggaaatccgtctaatattataaaacaatga

SEQ ID NO: 920 - protein, 73 aa, Haemophilus influenzae
PLCVMCLEQGKYTPATVIDHIKPVENGQADPLFWVASNHQPLCRDCHSYKTRVIDQRGFGAKKDGNPSNIIKQ

SEQ ID NO: 921 - DNA, 315 bp, Haemophilus influenzae
atggtggaaattaatttaacgattgatgaaatcaaagcgcacttaaatctcgatcatgatttggacgatgaattattggaagcctacaagagcaccgcattggaagtctgtcgcaagcatatcggcaaaacctttggcgaggaagagacggagcaaactgttccctttaccccggcgattaaggtcggttgcttaatgtatattgcttacctttacaccaaccgcgaagccgtcaccgacttagccaatcttaaaccggcgccgatgacaatttccgctttgtgggacgtgtatcgagagccatgcgtttactaa

SEQ ID NO: 922 - protein, 104 aa, Haemophilus influenzae
MVEINLTIDEIKAHLNLDHDLDDELLEAYKSTALEVCRKHIGKTFGEEETEQTVPFTPAIKVGCLMYIAYLYTNREAVTDLANLKPAPMTISALWDVYREPCVY

SEQ ID NO: 923 - DNA, 372 bp, Haemophilus influenzae
gtgatgaacaagaaccgggggcaagcgatggcaatcatgattaaggccggaaagtataacaaggtgattagcctacaaaagcaagtgaacgaacagaacgactacggcggtattgtgagtaaatggaaaaccgttgccaatatccgggcggcggttgaaccattacaaggtagagagttcttctccggtgcggtgccattaaatgaaaatactgtgcgcattcgcatacgttacggaactaatgttgataacactatgcgcgtgaaatatgggaaccgttcgctagagataatgaacattattgatagtaaagaagcgcacaaagaactacagcttatctgtaaggagttgactggcaatggtggaaattaa

SEQ ID NO: 924 - protein, 123 aa, Haemophilus influenzae
MMNKNRGQAMAIMIKAGKYNKVISLQKQVNEQNDYGGIVSKWKTVANIRAAVEPLQGREFFSGAVPLNENTVRIRIRYGTNVDNTMRVKYGNRSLEIMNIIDSKEAHKELQLICKELTGNGGN

SEQ ID NO: 925 - DNA, 1233 bp, Haemophilus influenzae
atgtggaacccgttcagacgaaaagaacaacgcagcgcaccgatggcaattaatgagctgctttcttatcttggtgtatcaaataccggcgcaggggaatttgtcagcccgaacacggcggaaagtttaccggcggtgatgagtgccgttactgttatttcagaagcggtggccagtatgccttgttatttgtatcagcttaaagacgatggccgcgagcgcgtttatcgtcacccggtggactatctcttaaacgagatgccaaaccgtagccaaacaccgtatcaattcaaatacaccatgatgcgtcactgcctattaaatggtaacgcttatgcggtgattgaatggaacagcaaaggcgaaccggtcagccttaccccgtatgaaccaagtgcggtcaatatctatcgcaaagttggcggtgagtatatctatcaaattaccgatttagacggcaacagcaaaaactatcttcaagatgaaatcctacatttacgccattcatcccttgatggctttatgggtcgttccccaattacgatttgccgtgaaaccgtgggcttaggtatcgctcaacagaaacacggatcggcagtgatgaaaaacggattaatggcgagcggattaattactaccgccgaatggttggacgatgccaaagcacaaaaagcggtaaaagcccttgaacgttacaaaggcgcgaagaacgcagggaaaacacccatccttgaaggctcaatggaatataaacagttaggcatgacaaaccaagacgcagaatggttagcaagccgtacgttcacaatttccgatattgccagaatctacaacattagcccaattttccttcaagactactccaatagcagttattcaaactttagtgaagccagtcgagcctttttatcgcaaaccttgcgcccttggctaaccaattttgaacagcagctaaaagatgccttgatgattgatttaggcagcaacagcaagaaacgttacttaattgaatttgatacaagcgacttattgcgcacaagtcaaagcgaacgcttcaagagttacgatgtggcaattaaagccggtgtaatgtgcccaaatgaagtccgccgccgtgaaggtttaccgccttatgagggtggagaagaatttagccaagcatggaaacaaaccgtagaagttaaacgcggtgatgaacaagaaccgggggcaagcgatggcaatcatgattaa

SEQ ID NO: 926 - protein, 410 aa, Haemophilus influenzae
MWNPFRRKEQRSAPMAINELLSYLGVSNTGAGEFVSPNTAESLPAVMSAVTVISEAVASMPCYLYQLKDDGRERVYRHPVDYLLNEMPNRSQTPYQFKYTMMRHCLLNGNAYAVIEWNSKGEPVSLTPYEPSAVNIYRKVGGEYIYQITDLDGNSKNYLQDEILHLRHSSLDGFMGRSPITICRETVGLGIAQQKHGSAVMKNGLMASGLITTAEWLDDAKAQKAVKALERYKGAKNAGKTPILEGSMEYKQLGMTNQDAEWLASRTFTISDIARIYNISPIFLQDYSNSSYSNFSEASRAFLSQTLRPWLTNFEQQLKDALMIDLGSNSKKRYLIEFDTSDLLRTSQSERFKSYDVAIKAGVMCPNEVRRREGLPPYEGGEEFSQAWKQTVEVKRGDEQEPGASDGNHD

SEQ ID NO: 927 - DNA, 567 bp, Haemophilus influenzae
atgaataaagaatttgaaatccgttcatccgaaatcaccgcagacagcgagaataaaaaactggttggctatgtggtgaagtggaacagcccttctgaagtgctttattgcgattttgtagaacaattcagtgcgaatgcgtttagtgaaagtttaagcagcggtgccgatgtacgggcgttatttgaacacgatcattccaaactattagggcgcacccgtgcgggaaccttaaaactggaagaagacacaataggcttacgttttgaattaatgccacctgataccaccttagggcgtgatttattggtaagtgttgaacgcggcgatattaccggaatgtctttcggcttttgggctaaagaagaaacatggaattttgatgtagagccttgtcaacgcacagtggccaaagccgaattatttgaaatcaccgttaccagcattcctgcctatcctgaaagtagcgttgagattgccaaacgatcaatggcaaccgcgaagggaaaaacgcaaggaaaatccaccgcacttttgaaacagtggcttgatgtggcggaggcgtaa

SEQ ID NO: 928 - protein, 188 aa, Haemophilus influenzae
MNKEFEIRSSEITADSENKKLVGYVVKWNSPSEVLYCDFVEQFSANAFSESLSSGADVRALFEHDHSKLLGRTRAGTLKLEEDTIGLRFELMPPDTTLGRDLLVSVERGDITGMSFGFWAKEETWNFDVEPCQRTVAKAELFEITVTSIPAYPESSVEIAKRSMATAKGKTQGKSTALLKQWLDVAEA

SEQ ID NO: 929 - DNA, 1188 bp, Haemophilus influenzae
atgtttaaaaaactgttagaactacgccaacaaaaagcggaaaaagtcgcagcaatgcgcgctatgttagacaaagcggaacaagaaaaccgctcattaaatgatgccgaaaacgttgactttgaaaagttgaaagatttggttaaacaattgagcgatgaaatcgcccgttatgaaacggtggccgatgaagaacgtaacattgccgacaaaggcaagccggtagaaacacgcggtaaaaccttcagcaatgacgaactacgccactacattaaaacgggtgaattacgaaatctttccaccaccggtcaagaagatggcggttataccgtgatcccacaattggataaagacgtaatgaaacgcttaaccgatgatagcgtgatgcgtcaaatttgtaacgtggtccgcttgccggttggtgcgaaagaatacaaaaaacttgtttccgccggtggtgcggtagtggcccatggtgaggaaggtcaagcccgcaatgacaccgccacaccgaaactccatgaagtcaccattgcgttaaaccctatctatgcttatccgaaaacgactcaagaaatcttggacttctccagtattgatgttttaggttggctgactgatgaaattaccgaaagcttcaccgaaaccgaagaaaccgacttaaccggcggcgacggcacgaagaaatcaaaaggcttcttatcctatgaacgttctaccgaagcggacaaagtacgcgcctttggtaagttacaaaaattagacgttgctggtgccgacaaaatcaccgccgatacgctcattgatttgttctacaccttacacagcaaataccgtaaaaatgccgtttgggtgatgtcttccactattgcggcggcattacaaaaactcaaaaacaaaaacggcgattttatttggcgtgatggtttaaccgtagatgcgccttctacccttttaggtcgtccggtttacttccttgagaccatgccggcaagtggtgccaataaaccggtagttgcctttggtgacttcaagcgcggttacttcattgtagatcacgaaaccggcgtaagaacccgccccgataacattaccgaaccgggcttctataaagtccataccgataaatatcttggtggtggcgtggtagatagtaacgcaatcaaattcattgaagttacggcttaa

SEQ ID NO: 930 - protein, 395 aa, Haemophilus influenzae
MFKKLLELRQQKAEKVAAMRAMLDKAEQENRSLNDAENVDFEKLKDLVKQLSDEIARYETVADEERNIADKGKPVETRGKTFSNDELRHYIKTGELRNLSTTGQEDGGYTVIPQLDKDVMKRLTDDSVMRQICNVVRLPVGAKEYKKLVSAGGAVVAHGEEGQARNDTATPKLHEVTIALNPIYAYPKTTQEILDFSSIDVLGWLTDEITESFTETEETDLTGGDGTKKSKGFLSYERSTEADKVRAFGKLQKLDVAGADKITADTLIDLFYTLHSKYRKNAVWVMSSTIAAALQKLKNKNGDFIWRDGLTVDAPSTLLGRPVYFLETMPASGANKPVVAFGDFKRGYFIVDHETGVRTRPDNITEPGFYKVHTDKYLGGGVVDSNAIKFIEVTA

SEQ ID NO: 931 - DNA, 1671 bp, Haemophilus influenzae
atgaagttatttttaacccaatcagctaatgtaggcgatgcgaaagcctatttattacatgaagtttttcgagcagctgcacaaaaagcaaatgtctctattgtagaaacaccagccgaagcagatcttgttcttgtatttggttctgtcttaccaaataaccctgcgttagtcggtaaaaaagtctttattatcggcgaagctatcgccatgatttctcctgaagtcacgctggcaaatgctttagccaatggggctgattatgttgcaccgaaaagtgcggtgagttttacaggtgtttttggtgtaaaaaatattgttgcggtaactgcttgtccaactggcgttgcacatacgtttatgtcggctgaagcgattgaagcctatgcgaaaaagcaaggttggaatgtaaaagttgaaacccgtggccaagttggggctggcaatgaaattactgtggaagaagtcgcagcggctgatttggtatttgttgcagcagatattgatgtgcctttagataaatttaaaggtaagccaatgtaccgcacttcaacaggcttagccttgaagaaaaccgatcaagaatttgataaagcatttaaagaggccaaaatttttgatggtggaaataatgcgggaacgaaagaagaaagccgtgagaaaaaaggtgtgtacaaacacttaatgactggtgtttctcatatgttaccgttagtggttgctggtggattgttgatcgcgatttcctttatgttcagttttaatgtaattgaaaatacaggagtttttcaagatcttcccaatatgttgatgaatatcggtagtggtgtggcgtttaagttaatgattgccgtgtttgccggttacgttgcattttctatcgctgatcgtccaggacttgcagttggtttgattgcggggatgctggcaagtgaagcgggtgcagggattcttggcggtattattgcaggtttcttagcgggctatgtggtgaaaggactgaatgttattattcgattgccagcaagtctgacttcattaaaaccgattttaattttaccgctcttaggttcgatgattgttggtttgacgatgatttacctcatcaatccaccagtggctgaaattatgaaagagctaagtaattggcttacttcaatgggcgaagtgaatgcgattgttttaggtgcaattatcggcgcaatgatgtgtatcgatatgggcggaccagtaaataaagcagcgtacactttttcggttggattgattgcttcccaagtttatacaccaatggctgcggtaatggccgcaggtatggttcctccaattggtatgacagttgcgacttggattgctcgcaataaatttaccgttagccaacgcgatgcggggaaagcatcatttgttcttggcttatgttttatttctgaaggtgcattaccatttgtggcagcagatccaattcgagtcattattagctctgtgattggtggtgcggtggctggtgcgatttcaatgggattaaatattaccttacaagctccgcacggcggattatttgtcattccatttgtgtctgagccgttgaaatatcttggtgcaattgcgattggtgctttatcaacaggtgtggtttacgccattattaaatcgaaaaacaatgcggaataa

SEQ ID NO: 932 - protein, 556 aa, Haemophilus influenzae
MKLFLTQSANVGDAKAYLLHEVFRAAAQKANVSIVETPAEADLVLVFGSVLPNNPALVGKKVFIIGEAIAMISPEVTLANALANGADYVAPKSAVSFTGVFGVKNIVAVTACPTGVAHTFMSAEAIEAYAKKQGWNVKVETRGQVGAGNEITVEEVAAADLVFVAADIDVPLDKFKGKPMYRTSTGLALKKTDQEFDKAFKEAKIFDGGNNAGTKEESREKKGVYKHLMTGVSHMLPLVVAGGLLIAISFMFSFNVIENTGVFQDLPNMLMNIGSGVAFKLMIAVFAGYVAFSIADRPGLAVGLIAGMLASEAGAGILGGIIAGFLAGYVVKGLNVIIRLPASLTSLKPILILPLLGSMIVGLTMIYLINPPVAEIMKELSNWLTSMGEVNAIVLGAIIGAMMCIDMGGPVNKAAYTFSVGLIASQVYTPMAAVMAAGMVPPIGMTVATWIARNKFTVSQRDAGKASFVLGLCFISEGALPFVAADPIRVIISSVIGGAVAGAISMGLNITLQAPHGGLFVIPFVSEPLKYLGAIAIGALSTGVVYAIIKSKNNAE

SEQ ID NO: 933 - DNA, 972 bp, Haemophilus influenzae
atggcaagcgtcgtaaccattaccttaaatgccgcctatgatttagttgggcgtttaaatcgtattcaacttggcgaagtaaatacggtagaaacattgggcttattccctgctggaaaaggcattaatgtcgcaaaagtactaaaagatttaggcgttaatgttgcagtcggtggctttttgggcaaggataattcagctgattttgagcaaatgtttaatcagcacggtttggaagataaattccaccgtgttgatggcaaaacgcgtatcaatgtaaaaattaccgagactgaagcggatgtgacagatttaaatttcttggggtatcaaataagcccacaagtttggcaacaatttgtgacggattctttggcttattgtttaaattatgacattgtcgcagtttgtggcagtttacctcgaggtgtgtctcctgaattgtttgctgattggttgaatcagcttcaccaagctggcgtaaaagtggtgcttgatagtagcaatactgcgctcaccgctggattaaaagcgaaaccttggctagtaaaacccaatcatcgagaacttgaggcttgggttggtcatccattaaatagtcttgaagaaattattgcggctgcacagcaactcaaagcggaaggcattgaaaacgtgattatttcaatgggcgaaaaaggttctttatggattaataatgaaggcgtgctcaaagccgaaccagcaaaatgtgaaaatgtcgtgagtaccgttggggcgggcgattccatggtagcaggcttaatctatggttttgaaaaaggtttatcgaaaacagaaactttagcttttgctacggctgtgtccgcttttgcggtatctcagagtaacgttggtgtgagtgatttgagtttacttgaccccattttagaaaaagtacaaataacgatgattgaaggattgtatgaagttatttttaacccaatcagctaa

SEQ ID NO: 934 - protein, 323 aa, Haemophilus influenzae
MASVVTITLNAAYDLVGRLNRIQLGEVNTVETLGLFPAGKGINVAKVLKDLGVNVAVGGFLGKDNSADFEQMFNQHGLEDKFHRVDGKTRINVKITETEADVTDLNFLGYQISPQVWQQFVTDSLAYCLNYDIVAVCGSLPRGVSPELFADWLNQLHQAGVKVVLDSSNTALTAGLKAKPWLVKPNHRELEAWVGHPLNSLEEIIAAAQQLKAEGIENVIISMGEKGSLWINNEGVLKAEPAKCENVVSTVGAGDSMVAGLIYGFEKGLSKTETLAFATAVSAFAVSQSNVGVSDLSLLDPILEKVQITMIEGLYEVIFNPIS

SEQ ID NO: 935 - DNA, 1500 bp, Haemophilus influenzae
atgttagaactttcggaaagcaacattcatttaaatgctaatgcaattgataaacaacaagcgatcgaaatggcagcgtccgcattggttcaagcaggcaatgttgaaaatggttacttgcaaggaatgttagcgcgcgagctgcaaacctcgacctttttaggcaatggcatcgctattcctcacggcaccttggatactcgttcgatggtaaagaaaacgggcgtgcaagtgtttcaatttcctcaaggcatagaatggggcgaaggaaatattgcttatgtcgtgattggtattgcggcgcgatctgatgagcatttgtccttattgcgccaacttacccacgttttgagtgatgaagataccgcagcaaaattagcaaaaataactgatgtggctgaattttgcgcgattttaatgggcgagacaattgatccatttgaaattcctgctgccaatatcagtttagatgtaaatacccaaagtttattaactttagttgcgattaatgcggggcaattacaggtgcaaagtgcggtagaaaatcgctttatttctgaagtgataaataatgcggcattaccacttggcaaagggttatgggtaacggactctgtcgtaggaaatgtgaaaaatgccttagcatttagtcgtgctaaaacaatttttagccacaatggcaaggccgtaaaaggcgtgataactgtttcagccgtcggtgatcaaattaatccaactttggcgcgtttattagatgacgatgtccaaacaaccttgctcaatggaaattcaacagaaattttgaccgcacttttgggttcatcgagtgatgttgaaactcaatctgtagaaggtgctgttgtaggaacctttacgattcgtaatgaacacggcttacatgcacgcccaagtgcaaatttggttaatgaagtgaaaaaattcacttctaaaataaccatgcaaaatcttactcgtgaaagtgaagtcgtcagcgcaaaaagtttgatgaagattgttgcgcttggtgtaacacaaggtcatcgtttacgttttgtggcagagggggaagatgcaaaacaagcgattgaatcattgggcaaagcgatagccaatggcttgggagagaatgtttcggcagtgccaccgtctgaacccgataccattgagattatgggcgatcaaattcacatacctgcggtaacagaagatgataatttgccggcaaatgccattgaagccgtatttgtgattaaaaacgagcaaggtttgcacgctcgcccaagtgcaatattggtaaacgaagtgaagaaatataatgcttccgtagcagttcaaaaccttgatcgtaattctcaattagtcagtgctaaaagtttgatgaaaattgtagcattaggcgtagtgaaagggactcgtttacgttttgttgcgacgggcgaagaagcgcaacaagctattgacggaatcagtgctgtgattgaatcgggtttaggggaatag

SEQ ID NO: 936 - protein, 499 aa, Haemophilus influenzae
MLELSESNIHLNANAIDKQQAIEMAASALVQAGNVENGYLQGMLARELQTSTFLGNGIAIPHGTLDTRSMVKKTGVQVFQFPQGIEWGEGNIAYVVIGIAARSDEHLSLLRQLTHVLSDEDTAAKLAKITDVAEFCAILMGETIDPFEIPAANISLDVNTQSLLTLVAINAGQLQVQSAVENRFISEVINNAALPLGKGLWVTDSVVGNVKNALAFSRAKTIFSHNGKAVKGVITVSAVGDQINPTLARLLDDDVQTTLLNGNSTEILTALLGSSSDVETQSVEGAVVGTFTIRNEHGLHARPSANLVNEVKKFTSKITMQNLTRESEVVSAKSLMKIVALGVTQGHRLRFVAEGEDAKQAIESLGKAIANGLGENVSAVPPSEPDTIEIMGDQIHIPAVTEDDNLPANAIEAVFVIKNEQGLHARPSAILVNEVKKYNASVAVQNLDRNSQLVSAKSLMKIVALGVVKGTRLRFVATGEEAQQAIDGISAVIESGLGE

SEQ ID NO: 937 - DNA, 531 bp, Haemophilus influenzae
atgtttaaaaaaatctctgttttattttttacgttaatattggcaggttgttcttcttggtcatcggttactaactatattccatttatggggaacgataaaaaagtgattgatttagataaagataaaatcgatcaaaaatcttatgcagctgcttatgaagcgactgtggcgacatataaaggtcgcgtgaatgaaaatttctttgtagataattttgcaagtggtgcgaatgactggtatttaggtcgtattttagttcctgtgaaacaaattcaggataaactttatacaggcggacatgattctgatgtatatgcttattatagtggtgtgttacatgcggaagcattgcaagctaaccttaaacgtttgagtgcaaattgttgggaaaaagtggattcgcaaagtatggctcaaggtatttatgatgcgatgcgtgatttacaaaaaggcgaagcgcgcggagaaaatgatgaatatattgtgcaaggtagtgaagcgctgctgaaagcctgtacatctaaataa

SEQ ID NO: 938 - protein, 176 aa, Haemophilus influenzae
MFKKISVLFFTLILAGCSSWSSVTNYIPFMGNDKKVIDLDKDKIDQKSYAAAYEATVATYKGRVNENFFVDNFASGANDWYLGRILVPVKQIQDKLYTGGHDSDVYAYYSGVLHAEALQANLKRLSANCWEKVDSQSMAQGIYDAMRDLQKGEARGENDEYIVQGSEALLKACTSK

SEQ ID NO: 939 - DNA, 138 bp, Haemophilus influenzae
atgaatgaagatatggcgaatctctttcaggcaatgaatgcactaaaacagttggcgtggatttctcagtcggtacgagatattcgcgcttttcgtattgagcaatggtctgattttactgattttatacgaaattaa

SEQ ID NO: 940 - protein, 45 aa, Haemophilus influenzae
MNEDMANLFQAMNALKQLAWISQSVRDIRAFRIEQWSDFTDFIRN

SEQ ID NO: 941 - DNA, 96 bp, Haemophilus influenzae
atgtacgcgattgcttttgatttagttgtaaaagacactcaagattatcatccaaagggtgttcaacaggcttatacagacattggcgaaacctag

SEQ ID NO: 942 - protein, 31 aa, Haemophilus influenzae
MYAIAFDLVVKDTQDYHPKGVQQAYTDIGET

SEQ ID NO: 943 - DNA, 204 bp, Haemophilus influenzae
ttgaggttaaatatggaactaagacaacaaattccaacaggctgtattaagcaattcgggcaatttggcgtgccttatgtggttggcgaggttgcggaatttttgccagatggtgatgtgttggtaaatatcacattgttacaatctggagaaaaagacatttatcgattatctcacctgcttgaagatcccgaagctgaataa

SEQ ID NO: 944 - protein, 67 aa, Haemophilus influenzae
MRLNMELRQQIPTGCIKQFGQFGVPYVVGEVAEFLPDGDVLVNITLLQSGEKDIYRLSHLLEDPEAE

SEQ ID NO: 945 - DNA, 1293 bp, Haemophilus influenzae
atggaattatttcatactattttggcaattgtggctttaattttaagtagtgcagttgtttcttctgctgaaatttctctggcgagttctcgtaagttaaaattgcaatctcttgcaaatgaaggcgatgtgcgcgcgcttcaagtgcttaaattacaagaacatcctggtcgttttattacggtggttcaaattttgttgaatatggtggcgattttgggtgggggaattggcgaaagtgcgctaagtccttacattgcagatattttaaatcgttcttttgaaggaaattggattgagccaactgcctctacaatcgcttttatattagtgacttgtttgtttattttatttgccgatcttattccaaaacgaattgctattacttatcctgaaatgatggcgttgcgcgttgtgggtattatgaattttagtatgtatgtgtttaaaccgcttgtgtggttttttgatacgcttgctaatgcctttttccgtctatttcgcatttctactgtgcgtgaagatggcatgacctctgaagatattttcgccgtagttgaagcaggcgcagaagctggtgtattaaaaactcaagagcattatttgatcgaaaatattttcgatatgcaagcccgtacggtaacttccacaatgacaacccgtgaaaacatcgtatatttagaccgcactttttctcgccaagaagtgatggatacgctttctcgtgattctcattctaaaattgtgatttgtgacaatggcctcgacaaaatcttaggttatatcgaatcccatactttgctcaccatgtatttgaaaaatgaaaatgtggtgctcacagatcctaaactactccgtaaagccttatttgtgcctgatacgctttctctttacgaagtgttggaattgtttaaatctactggcgaagattttgcgattattgtgaatgaatatgctcttgtagtgggtattgttacgctaaatgatgtgatgagtattgttatgggagaattggtttctaacgaagaagaatatattgtgagccgtgatgaaaactcgtggctgattgatggcgcaacgccattaaaagaggtaactcgagtattagatattgcttattttcccgatgaagaaaactacgaaactatcggtggttttatgatgtatatgttacgtaaaatcccgaaaaaaaccgattctgtggtttacggaaaatacaagtttgaagtgattgatacggaaaactttaaaatcgatcagattttggtgtctttagtaaaagagcaggagtag

SEQ ID NO: 946 - protein, 430 aa, Haemophilus influenzae
MELFHTILAIVALILSSAVVSSAEISLASSRKLKLQSLANEGDVRALQVLKLQEHPGRFITVVQILLNMVAILGGGIGESALSPYIADILNRSFEGNWIEPTASTIAFILVTCLFILFADLIPKRIAITYPEMMALRVVGIMNFSMYVFKPLVWFFDTLANAFFRLFRISTVREDGMTSEDIFAVVEAGAEAGVLKTQEHYLIENIFDMQARTVTSTMTTRENIVYLDRTFSRQEVMDTLSRDSHSKIVICDNGLDKILGYIESHTLLTMYLKNENVVLTDPKLLRKALFVPDTLSLYEVLELFKSTGEDFAIIVNEYALVVGIVTLNDVMSIVMGELVSNEEEYIVSRDENSWLIDGATPLKEVTRVLDIAYFPDEENYETIGGFMMYMLRKIPKKTDSVVYGKYKFEVIDTENFKIDQILVSLVKEQE

SEQ ID NO: 947 - DNA, 525 bp, Haemophilus influenzae
atgcgaaaattttttaaatatttcttatttattgttgtttttttattccacggttttatgttttccgtagtgaattatgtatttcctcattacgatgtgacgcgtgttactggcgtagaagttaaacgtgttgataaagacggccccatcacaaaatcgaatccagctgatggcccaacacgtgatgtgtattacatcaatacgcaaaatgacgatggtaaaattatggtgtatcgcaatgaagatacacgttgggggttcccgttctacttcaaatttggctcagccaatttacaggctgaagcgcaggctttgggtaatgacaacaaacttgtgcaaattaaatactatggttggcgtattacgatcgtggatgaatatcgtaatgcaacctcaattaaagaaattactgctgatgaaacaccaagcaatccgattgtttcgtggattttatatgtattcttgctggcgacattatttttgtctatccaatttattcgtggctggtttgacagcgataagtaa

SEQ ID NO: 948 - protein, 174 aa, Haemophilus influenzae
MRKFFKYFLFIVVFLFHGFMFSVVNYVFPHYDVTRVTGVEVKRVDKDGPITKSNPADGPTRDVYYINTQNDDGKIMVYRNEDTRWGFPFYFKFGSANLQAEAQALGNDNKLVQIKYYGWRITIVDEYRNATSIKEITADETPSNPIVSWILYVFLLATLFLSIQFIRGWFDSDK

SEQ ID NO: 949 - DNA, 783 bp, Haemophilus influenzae
atgttcattgttgattcccactgccatttagatgcgttggattatgaaaatttacataaaaatatctcggatgtggtggaaaaagcacgtgcgcgtgatgtgaaacatttgctcgcgattggtgtaaccttaagccgttttgagcaggcttatgactctttacgggaatttaataatgtctcgcttgcttgtggtgttcacccacttgattttgaagaagaaccttatgacgcagagcgtttattgcgtttggcgcaagatccgaaagtgattgctattggcgaaattggattagattattattacagtgcggacaataaagcggcgcaacaagcggtgtttggtagccaaatcgatattgcaaaccaattagataagcctgtgattattcatacacgttctgcaggcgatgacaccattgcaatgttacgcgaacatcatgctgaaaagtgcggtggcgttattcattgttttacggaaactatggaatttgcgaaaaaagcgttggatttaggattttacatttcttgttctggcattgtcacctttaaaaatgccgaagcgattcgtgaggttattcgttatgtaccaatggaacgcttattggtggagacggattcgccttatcttgcgcctgtgccttacagaggaaaagaaaaccaaccagcgtatacgagagaagtatgtgaatacgtggcaaccttaaagggcgtttctgcagaggcgtttgctcaaatcactacacaaaatttcgagcgtttatttaaaattcgtgtagaataa

SEQ ID NO: 950 - protein, 260 aa, Haemophilus influenzae
MFIVDSHCHLDALDYENLHKNISDVVEKARARDVKHLLAIGVTLSRFEQAYDSLREFNNVSLACGVHPLDFEEEPYDAERLLRLAQDPKVIAIGEIGLDYYYSADNKAAQQAVFGSQIDIANQLDKPVIIHTRSAGDDTIAMLREHHAEKCGGVIHCFTETMEFAKKALDLGFYISCSGIVTFKNAEAIREVIRYVPMERLLVETDSPYLAPVPYRGKENQPAYTREVCEYVATLKGVSAEAFAQITTQNFERLFKIRVE

SEQ ID NO: 951 - DNA, 1002 bp, Haemophilus influenzae
gtggaaatcaaacgaaaaatgaccgcactttatccttggctaatgccaatttatcatcaaattgctcaaacctttgacgaagggttggggcatcatgctgtgctaattaaagctgattctggtttaggcgtagagagtttatttaatacacttgcacagaaaataatgtgtgtagctcaaggcgataaaccttgtggtcaatgccattcttgtcatttaatgcaagcccatagccatccagattatcacgaattaagccccattgacggtaaggatattggcgttgatcaagtacgcgacattaatgaaatggttgctcaacacgcacaacaaaatggtaataaagtggtgtatgtgcaaggtgcggaacgtttaacggaggcggctgctaatgcgttattgaaaacattggaagagcctcgtccaaatacttattttttacttcaagcggatagttcggcaagtttgttagcaactatttacagtcgatgccaagtgtggaatctatctgtgcctaatgaacaaatggctcttgattggttgaaatcagaaagtgcggtagaaaatcaggaaattttgaccgcacttgcgatgaatcttgggcgtccgcttttagcattagagactttacaagaaggatttattgaacagcgtaaaaacttcttgcgtcaattttgggtgttttatcgccgacgttcgccattggaattgcttccgttgtttgataaagaacgctatgttcagcaagtggattggattttggcttttctttctgattgtttaaagcataaacttgaaattgatagtcatcgacaagtggctgatctcgggcgtggcatcgaacaattcagcgacgagcaaactgcccttggtttattacaatcaatcaaaattatgcaaaaagtgcggtcagatttgctgacgattaatggcgtgaatgttgaattaatgctattggatggcttgacgcgattagtcacagaagtatttgaaacgcaataa

SEQ ID NO: 952 - protein, 333 aa, Haemophilus influenzae
MEIKRKMTALYPWLMPIYHQIAQTFDEGLGHHAVLIKADSGLGVESLFNTLAQKIMCVAQGDKPCGQCHSCHLMQAHSHPDYHELSPIDGKDIGVDQVRDINEMVAQHAQQNGNKVVYVQGAERLTEAAANALLKTLEEPRPNTYFLLQADSSASLLATIYSRCQVWNLSVPNEQMALDWLKSESAVENQEILTALAMNLGRPLLALETLQEGFIEQRKNFLRQFWVFYRRRSPLELLPLFDKERYVQQVDWILAFLSDCLKHKLEIDSHRQVADLGRGIEQFSDEQTALGLLQSIKIMQKVRSDLLTINGVNVELMLLDGLTRLVTEVFETQ

SEQ ID NO: 953 - DNA, 633 bp, Haemophilus influenzae
atgaaaggaaaatttattgtcattgagggcttagaaggtgcggggaaaagctccgctcatcagtctgttgtgcgagtcttgcatgagcttggtattcaagatgtcgtgtttacgcgcgagcctggtggaactccgttggcagagaaattacgtcatctcatcaaacatgaaatcgaagaacccgtgacagataaagcagagttattaatgctttatgcagcgcgtattcagttggtggaaaatgtgattaaacctgctttaatgcaaggaaaatgggtggtaggagatcgccacgatatgtcatctcaggcgtatcaaggtggcggacgtcaattagacccgcattttatgctcaccttgaaagaaaccgtattaggtgattttgagccagatctcaccatttatttagatatagatccgagcgtcggtttagcgcgagctcgtggacgtggtgaattagatcgtattgagaaaatggatttagattttttccaccgcactcgagcaagttatttagaattagtaaaagataatccaaaagcagtcgtaattaatgcagagcagagtattgaacttgttcaagctgatatcgaaagtgcggtaaaaaattggtggaaatcaaacgaaaaatga

SEQ ID NO: 954 - protein, 210 aa, Haemophilus influenzae
MKGKFIVIEGLEGAGKSSAHQSVVRVLHELGIQDVVFTREPGGTPLAEKLRHLIKHEIEEPVTDKAELLMLYAARIQLVENVIKPALMQGKWVVGDRHDMSSQAYQGGGRQLDPHFMLTLKETVLGDFEPDLTIYLDIDPSVGLARARGRGELDRIEKMDLDFFHRTRASYLELVKDNPKAVVINAEQSIELVQADIESAVKNWWKSNEK

SEQ ID NO: 955 - DNA, 771 bp, Haemophilus influenzae
  misc_feature 4, 5, 6, 7, 8: n is any nucleotide
atgnnnnntgtgcaagatttactggatttgcttattcagggtaaggaagtgcagttcaatgtaaaatggattgaaggaaaaacctttaaagattggcgaaaagatcttgaaaatgcaccgcacttggtgcaaaccttgaaagataagagtaacgaagaaattttcgcattacttgatttgccagatgtcggtcaaaatcttgaactaaaaaatgtggaaggttggttttatcctgatacttataactatacgcctaaatcgacagacttagagctacttaagcgatcggctgagcgaatgaaaaaggcgttaaataaggcttggaacgagcgtgacgaggatttacctttagcgaatccttatgaaatgttgattttggcttctatcgtggaaaaagaaacgggtattgctactgagagagcaaaagtggcatctgtatttctcaaccgtttaaaagcaaaaatgaaattacagacggatccaacggtaatttatggtatgggcgaaaattacaatgggaatattcgcaaaaaagatttagaaaccccaacaccttataatacttatgtgattgatggattgccgccaacgcctatcgctatgccaagtgaaagttcgttacaggctgtttcgaaccctgaaaaaacagatttttattattttgttgcagatggttctggtgggcataaatttacccgaaatttgaatgaacataataaagcggtgcaagaatatttacgttggtatcgcagtcagaaaaatgccaaataa

SEQ ID NO: 956 - protein, 256 aa, Haemophilus influenzae
  VARIANT 2, 3: Xaa is any amino acid
MXXVQDLLDLLIQGKEVQFNVKWIEGKTFKDWRKDLENAPHLVQTLKDKSNEEIFALLDLPDVGQNLELKNVEGWFYPDTYNYTPKSTDLELLKRSAERMKKALNKAWNERDEDLPLANPYEMLILASIVEKETGIATERAKVASVFLNRLKAKMKLQTDPTVIYGMGENYNGNIRKKDLETPTPYNTYVIDGLPPTPIAMPSESSLQAVSNPEKTDFYYFVADGSGGHKFTRNLNEHNKAVQEYLRWYRSQKNAK

SEQ ID NO: 957 - DNA, 999 bp, Haemophilus influenzae
  misc_feature 981, 982, 983, 984, 985: n is any nucleotide
gtgagttttgcttattacaaaatgactgaatttgtaaaaacaccagtaaatgtgcaggcagatcaacttttaactattgaacgtggcacaacaggttcaaaattagccgcactttttgagcaagaaaagttaattgctgatgggaaattattaccttatttgctgaagttgaaacctgagctaaataaaataaaagcagggacttattctcttgagaatgttaaaactgtgcaagatttactggatttgcttaattcaggtaaggaagtgcagttcaatgtaaaatggattgaaggaaaaacctttaaagattggcgaaaagatcttgaaaatgcaccgcacttggtgcaaaccttgaaagataagagtaacgaagaaattttcgcattacttgatttgccagatgtcggtcaaaatcttgaactaaaaaatgtggaaggttggttttatcctgatacttataactatacgcctaaatcgacagacttagagctacttaagcgatcggctgagcgaatgaaaaaggcgttaaataaggcttggaacgagcgtgacgaggatttacctttagcgaatccttatgaaatgttgattttggcttctatcgtggaaaaagaaacgggtattgctactgagagagcaaaagtggcatctgtatttctcaaccgtttaaaagcaaaaatgaaattacagacggatccaacggtaatttatggtatgggcgaaaattacaatgggaatattcgcaaaaaagatttagaaaccccaacaccttataatacttatgtgattgatggattgccgccaacgcctatcgctatgccaagtgaaagttcgttacaggctgtttcgaaccctgaaaaaacagatttttattattttgttgcagatggttctggtgggcataaatttacccgaaatttgaatgaacataataaagcggtgcaagaatatttacgttggtatcgcagtcagaaaaannnnncattcattcattaa

SEQ ID NO: 958 - protein, 332 aa, Haemophilus influenzae
  VARIANT 327, 328, 329: Xaa is any amino acid
MSFAYYKMTEFVKTPVNVQADQLLTIERGTTGSKLAALFEQEKLIADGKLLPYLLKLKPELNKIKAGTYSLENVKTVQDLLDLLNSGKEVQFNVKWIEGKTFKDWRKDLENAPHLVQTLKDKSNEEIFALLDLPDVGQNLELKNVEGWFYPDTYNYTPKSTDLELLKRSAERMKKALNKAWNERDEDLPLANPYEMLILASIVEKETGIATERAKVASVFLNRLKAKMKLQTDPTVIYGMGENYNGNIRKKDLETPTPYNTYVIDGLPPTPIAMPSESSLQAVSNPEKTDFYYFVADGSGGHKFTRNLNEHNKAVQEYLRWYRSQKXXXFIH

SEQ ID NO: 959 - DNA, 936 bp, Haemophilus influenzae
atgaaaaaatttgttttaagatcttttttattggctgctttgggatgtgtcgcttttgcttctatggctcaagctggggaacgtgttgttgcaacagtagatggtattcctattttagaaagccaagtgcgtgccaatatgggtaaaaaaggtgatcgccaaagtgcgattgataaaattattgatgatattttggtgcaaaaagcagttcaagaatcgggagtcaaaattgatccgcgtgaaattgatcatattgtggaagacactgctgctagaaatggtttaacttatggtcaatttttagatgcgctggattaccaaggcatttcattaaatacattccgtcagcaaattgccaatcaaatggtaatgggggctgtacgtaacaaagctattcaagaaagtattgatgtaacgcgtgaagaagttgtcgcactcggtcaaaaaatgttagaagaagcgaaagaaaagggtacggcacagaaagttatggggaaagagtatgaagttcgccatattttgttaaaacttaatccattgttaaatgatgctcaagcaaaaaaacaattagctaaaattcgttctgatattattgcaggtaaaacaacttttgctgatgccgcattaaaatattctaaagattatttatcgggtgcgaatggcggtagtttaggttatgcgttcccagaaacttatgcaccacagtttgcgcaaaccgtcatgaaaagtaaacaaggtgtgatttctgcaccatttaaaactgagtttggttggcatattttggaagtaactggcgtacgtgatggcgatcttacagcagaagcctacacacaaaaagcatatgaacgtttagtaaatactcaattacaagatgcgacgaacgattgggttaaagcattgcgtaaaagagcgaatattcagtattttaataaataa

SEQ ID NO: 960 - protein, 311 aa, Haemophilus influenzae
MKKFVLRSFLLAALGCVAFASMAQAGERVVATVDGIPILESQVRANMGKKGDRQSAIDKIIDDILVQKAVQESGVKIDPREIDHIVEDTAARNGLTYGQFLDALDYQGISLNTFRQQIANQMVMGAVRNKAIQESIDVTREEVVALGQKMLEEAKEKGTAQKVMGKEYEVRHILLKLNPLLNDAQAKKQLAKIRSDIIAGKTTFADAALKYSKDYLSGANGGSLGYAFPETYAPQFAQTVMKSKQGVISAPFKTEFGWHILEVTGVRDGDLTAEAYTQKAYERLVNTQLQDATNDWVKALRKRANIQYFNK

SEQ ID NO: 961 - DNA, 540 bp, Haemophilus influenzae
atggaaaaaattattattgatcatgatcgttttcttcgcacaatttcgcgtatttctcacgaaattattgaaaaacatcaaaccttagatgatcttgttattgttgggattaaacgccgtggtgcggaaattgcagaattattacaacgtcgagttgaagagttaagtggtataaatttaccttcaatggaactggatattaccttttatcgagatgatttaactttggttgatcaggaagataaaatgccagtttatagtggttcatcacaatatttgaatattcaagataaaaccgtcattttggttgatgatgtgttgtttactggtcgaaccattcgagcggcaatggatgcgcttactgattttggtcgtgctgcaaaaattgaattagtgatttttgttgatcgtggccatcgtgaattacccattcgtgctgattacgtaggtaaaaatgtgccaacaagccgtgatgaacttgtgcaagttcgcactgaaaaacaagatggctgttacgaagttgctatcttagggaaataa

SEQ ID NO: 962 - protein, 179 aa, Haemophilus influenzae
MEKIIIDHDRFLRTISRISHEIIEKHQTLDDLVIVGIKRRGAEIAELLQRRVEELSGINLPSMELDITFYRDDLTLVDQEDKMPVYSGSSQYLNIQDKTVILVDDVLFTGRTIRAAMDALTDFGRAAKIELVIFVDRGHRELPIRADYVGKNVPTSRDELVQVRTEKQDGCYEVAILGK

SEQ ID NO: 963 - DNA, 792 bp, Haemophilus influenzae
atgcgctactccattcaagattttattcaactcatcgcccaacttcgcaatccaaatggcggatgcccttgggatttaaaacaaaattatgaatctatgatttcttgtttaacggaagaaacttacgaagtaatcgaagccattgagaaaaaagacataccaaatttacgtgaagaattaggggatttattgttgcaagtcgttttcttcagccagcttgcaacggaagataaatactttacttttgacgatgtgttacaagatatcgctgaaaaaattgtacgccgtcatcctcacgtgtttggtgatgcaaaagcgagagacgaaacagaagctctttcccgttggaatgaaatgaaagccaaagaaaaacaaggtaaaagtgaagaaacctctattttagataatgtgcctcgtgctttgccttctcttacacgagcagcaaaattacaaaaacgttgttcaaaagtagggtttgattgggaagaaatttcccccgtatttgacaaagtgcgggaagaattagaagaagttcaagctgaaattaaccgcacttcgattgaacaaaataaagtcgaagaggaaatcggcgatttattgttcgcaaccgtcaatcttgctcgccacttaaaatgtgatcctgaagatgcattgcggaaagcaaatttaaaatttgaacgtcgttttcgagcagtagagcaagcggttcaacaacaaggtaagcaagtgaataatgtgccacttattgaattagatttgttgtgggatgaagtgaaaaaacaagaaaactaa

SEQ ID NO: 964 - protein, 263 aa, Haemophilus influenzae
MRYSIQDFIQLIAQLRNPNGGCPWDLKQNYESMISCLTEETYEVIEAIEKKDIPNLREELGDLLLQVVFFSQLATEDKYFTFDDVLQDIAEKIVRRHPHVFGDAKARDETEALSRWNEMKAKEKQGKSEETSILDNVPRALPSLTRAAKLQKRCSKVGFDWEEISPVFDKVREELEEVQAEINRTSIEQNKVEEEIGDLLFATVNLARHLKCDPEDALRKANLKFERRFRAVEQAVQQQGKQVNNVPLIELDLLWDEVKKQEN

SEQ ID NO: 965 - DNA, 876 bp, Haemophilus influenzae
atgtccacgaaaaatcattttattttccccacttacgttcaaatgtatccttattctaaggatcgcccttttcttaaacaagtgcgggaaaaattacgctattatggctataaatggttatatcaaaagcaatgtcatcaattagtggatttccttaatacagaaacgcaatggcagtctttatttacacaagattattatcgtactaatacaattctgacgaccttttgcgataaacgtttttctgcttcagaacgtttaacggcgattacggagaatttacgtttggcagaagaaaaaatgggacgttcgctttgtcagcaattattagatcaacaaaatatcgtgctaacccaattaactgaggatttgcgtttatcgttgagtattaatcatatcgatccctttgaaggatatttttctattaatattcgcaatcaaaataacgaacgagtatatgatgcgtctttcacttttttaagcccgaataaattgcttatcgcctcaattcaaggcccctcaagcgacaatgcacaagaacttgtaaaacaggctacaaaagcattacacggtatgcgtccaatgtttatgttggttaatgggttcaaaatgctcgctgaaaaatggcaatgtgagttagtgggcattccgcacaaagcgcaaggaaaatatcgtctttctgcgcgcagtaagattttgtttaattacgatgaattttggcaagaaaaccaaggagaatatcgccataactattggcaattacctttgcatattgaacgcaaacaattagaagatatcgcaagtaaaaaacgttctatgtatcgtaaacgttatgaaatgttagaccaaatggcactggatattcagcaactttaa

SEQ ID NO: 966 - protein, 291 aa, Haemophilus influenzae
MSTKNHFIFPTYVQMYPYSKDRPFLKQVREKLRYYGYKWLYQKQCHQLVDFLNTETQWQSLFTQDYYRTNTILTTFCDKRFSASERLTAITENLRLAEEKMGRSLCQQLLDQQNIVLTQLTEDLRLSLSINHIDPFEGYFSINIRNQNNERVYDASFTFLSPNKLLIASIQGPSSDNAQELVKQATKALHGMRPMFMLVNGFKMLAEKWQCELVGIPHKAQGKYRLSARSKILFNYDEFWQENQGEYRHNYWQLPLHIERKQLEDIASKKRSMYRKRYEMLDQMALDIQQL

SEQ ID NO: 967 - DNA, 2412 bp, Haemophilus influenzae
atggcgaagaatacccaacgtacaatgcccgtattgccattacgcgatgttgtcgtttttccttatatggtgatgccactttttgtagggcgcgcaaaatcaattaatgcccttgaagaagcgatgaacgatgacaaacagattcttttggtatcccaaagagaagcggatttggaagaacctacccctgaagatttatttgatgtgggtaccattgctaacattattcagttattaaaattacctgatggcacagtaaaagtgctagttgaaggtcaaaatcgcgcgaaaattaacagccttgaagacggcgaaaagtgtttttccgcccaaattacccctatcgaaaccacttatggcgatgaaaaagagttagtggtggcaaaaagtgcggtactttctgagtttgaaaattatcttaccctcaacaaaaaagtgcctacagatattctcaatgcccttcaacgtattgatgatgttgatcgcttagctgacacaatggctgcccatctccctgtaagcattcgccataaacaaaatgcattagaactcgctaatgtgcaagaacgtttagaatatttacttggtatgatggaatcagaggctgatattctccaagtggaaaaacggattcgcggtcgtgtaaaaaaacaaatggagaaaagccagcgtaactattatttgaacgagcaaattaaagccattcgtaaagaaatggatggtggcgaaaatgaagataccattgatgaagttgaacaactgcatcaaaaggtggaagcggcaggcatgccagctgatgtacgcgacaaagtagaaaatgaattacaaaaacttaaaatgatgtcagccatgtcttctgaagcaacggtaatacgcagttatattgaatggatgatccaagtgccttggcatcaacgttctaaagtgaaaaaagacattgttaaagcacagcaagttttagataccgatcactatggtttagatcgcgtaaaagaacgcattcttgaatatttagcagtacaagcgcgtttaaacaaagtgaaaggcccgattctttgtttagttggccctccaggtgtaggtaaaacttctcttggtcagtctattgccaatgctactggtcgtaaatatgtacgtatggcattaggcggcgtgcgtgatgaagcagaaatccgtggtcaccgtaaaacctatattggtgcattgccgggtaaattaattcaaaagatggcaaaagtgggcgtaaaaaatccattattcttgcttgatgaaatcgacaaaatggcatccgatatgcgaggtgatcctgcatcagcattgcttgaagtattagaccctgagcaaaacaccacatttaacgatcactatttagaagtggattatgatctttctgatgtgatgtttgtagcaacatcaaactctatgaatattccaggtccattattggatcgtatggaagttattcgtctttctggttatacagaagatgaaaaacttaatatcgcaatgcgccatttattagcaaaacaaattgaacgtaatggtttgaagaaaggcgaacttaccgtagaagaaagtgcaattttagatattatccgctattacacacgtgaagcgggcgtacgtggattagaacgtgaaatttcaaaaatctgccgtaaagccgtgaaaaatttattagtaaatccaaaacttaaatctatcacggtaaattcagataatctgcacgattatcttggcgtaaaacgttttgaatttggtaaagctgacacgcaaaaccgcattggtgaagtgactggtttagcttggacagaagtgggcggcgatttactcactattgaaactgcctctgttgtgggcaaaggaaaactttctttcactggttcattaggcgatgtgatgaaagaatccattcaagcggcaatgaccgttgtgcgtgctcgtgcggataaactgggtatcaatgctgaattccacgaaaaacgtgacattcacattcacgtgccagatggtgcaacaccaaaagatggcccaagtgcaggtattgcaatgtgtactgcattaatttcttgtttaacaggtaatcctgtgcgtgctgatgtggcaatgacgggagaaatcagtttacgtggtaaagtattaccaatcggtggattaaaagaaaaacttcttgcggcacatcgtggcggaattaaaaccgtattaatcccaaaagaaaacgttaaagatcttgaagaaattccagaaaacgtaaaacaaaatcttgcaattcatgcggtagaaaccattgatgaagtgcttggttttgcattggaaaatccaccagagggcattgagtttgttaaagtggaggctaaacctaaagcaccacgccgtaaagtgacgagtaaatcagaaagagcggtcaattaa

SEQ ID NO: 968 - protein, 803 aa, Haemophilus influenzae
MAKNTQRTMPVLPLRDVVVFPYMVMPLFVGRAKSINALEEAMNDDKQILLVSQREADLEEPTPEDLFDVGTIANIIQLLKLPDGTVKVLVEGQNRAKINSLEDGEKCFSAQITPIETTYGDEKELVVAKSAVLSEFENYLTLNKKVPTDILNALQRIDDVDRLADTMAAHLPVSIRHKQNALELANVQERLEYLLGMMESEADILQVEKRIRGRVKKQMEKSQRNYYLNEQIKAIRKEMDGGENEDTIDEVEQLHQKVEAAGMPADVRDKVENELQKLKMMSAMSSEATVIRSYIEWMIQVPWHQRSKVKKDIVKAQQVLDTDHYGLDRVKERILEYLAVQARLNKVKGPILCLVGPPGVGKTSLGQSIANATGRKYVRMALGGVRDEAEIRGHRKTYIGALPGKLIQKMAKVGVKNPLFLLDEIDKMASDMRGDPASALLEVLDPEQNTTFNDHYLEVDYDLSDVMFVATSNSMNIPGPLLDRMEVIRLSGYTEDEKLNIAMRHLLAKQIERNGLKKGELTVEESAILDIIRYYTREAGVRGLEREISKICRKAVKNLLVNPKLKSITVNSDNLHDYLGVKRFEFGKADTQNRIGEVTGLAWTEVGGDLLTIETASVVGKGKLSFTGSLGDVMKESIQAAMTVVRARADKLGINAEFHEKRDIHIHVPDGATPKDGPSAGIAMCTALISCLTGNPVRADVAMTGEISLRGKVLPIGGLKEKLLAAHRGGIKTVLIPKENVKDLEEIPENVKQNLAIHAVETIDEVLGFALENPPEGIEFVKVEAKPKAPRRKVTSKSERAVN

SEQ ID NO: 969 - DNA, 1152 bp, Haemophilus influenzae
atgccaaaacttcctccactttccctttatatacatattccttggtgcgttcaaaaatgtccttattgtgattttaattcgcacgcacaaaaaggcgatataccagaacaagactatatttatcatcttctgcaagatttgcaggctgatttgcaacgctttaaagattctattcaacaacgaaaactccattcaatttttattggtggcggtacaccaagtttgttctcggcagaaagcattgcgtatctcttaaaagaaataaaaaaacagattgattttgaagataatattgaaatcacattagaagctaatcctggcacggtagaagctgaacgttttaaaggttatgtatccgcaggcattacgcgaatttctatgggaattcaaagtttcaatgatgataaattacaacgtcttgggcggattcataatgcagcagaggcaaaaagtgcggtcaatttagcgaaagtttctgggctaaaaagtttcaatttagatttaatgcacggtttgccgaaccaaacgttggaagaagccttagatgatcttcgtcaagcaattgagctatctcctccccatatttcttggtatcagctgactattgaaccaaatacgatgtttgcttatcgcccacctaaattaccagatgatgacgcactttgggacatttttgagcaaggtcaccaacttttaaccgcagcgggctaccagcaatatgaaacgtctgcttacgcaaaagcgggttttcaatgtaaacataatttgaattattggcgatttggggattatttagccattggctgtggcgcacacgggaaattgacgtttccgactggcgagattactcgcttttctaaaaccaagcacccgaaaggttatttacgtggcgaatatctttacgaagaaaaaaacgtgccaaaaattgaccgcccttttgagttttttatgaatcgctttcgtttgttagaagcggtacccaaacaagaatttgaagattacacaggcttgtcgcaaagtgcggtgaaaaatcaaattgattttgccattcaacaaaactatattgtggaaaacgctgattcttggcaaatcactgaacacggcaagttatttctcaatgaacttttggaattatttttaacggaatcatag

SEQ ID NO: 970 - protein, 383 aa, Haemophilus influenzae
MPKLPPLSLYIHIPWCVQKCPYCDFNSHAQKGDIPEQDYIYHLLQDLQADLQRFKDSIQQRKLHSIFIGGGTPSLFSAESIAYLLKEIKKQIDFEDNIEITLEANPGTVEAERFKGYVSAGITRISMGIQSFNDDKLQRLGRIHNAAEAKSAVNLAKVSGLKSFNLDLMHGLPNQTLEEALDDLRQAIELSPPHISWYQLTIEPNTMFAYRPPKLPDDDALWDIFEQGHQLLTAAGYQQYETSAYAKAGFQCKHNLNYWRFGDYLAIGCGAHGKLTFPTGEITRFSKTKHPKGYLRGEYLYEEKNVPKIDRPFEFFMNRFRLLEAVPKQEFEDYTGLSQSAVKNQIDFAIQQNYIVENADSWQITEHGKLFLNELLELFLTES

SEQ ID NO: 971 - DNA, 660 bp, Haemophilus influenzae
atgaatcaattagaaatgaaaaaactcgccgcacaagctgcattacaatatgtaaaagcagatacgattgttggggtgggaagtggctccacggtgaactgctttattgaggctttgggtacaatcaaagataaaattcaaggtgccgttgcggcttcaaaagaatcagaagaattattacgtaagcaaggtatcgaagtatttaatgcaaatgatgtatctagcttagatatttatgtggatggtgcggatgaaatcaatccacaaaaaatgatgattaaaggcggcggcgcagcgctcactcgtgaaaaaatcgtcgctgcattagcgaaaaaatttatttgtattgtggattcgagtaaacaagtggatgtgttaggttcgaccttcccattaccagttgaagtgattcctatggcacgctcacaagtaggcagaaaattagccgcacttggtggctcacctgaatatcgtgaagacgtggtgacagacaacggcaatgtgattttagatgtacacaacttcagtattttaaatccagttgaaatggaaaaagaattaaataatgttgcaggtgtcgtcactaatgggatattcgcattacatggtgcagatgttgtgatcgtcgggacgcctgagggtgccaaagttattgactaa

SEQ ID NO: 972 - protein, 219 aa, Haemophilus influenzae
MNQLEMKKLAAQAALQYVKADTIVGVGSGSTVNCFIEALGTIKDKIQGAVAASKESEELLRKQGIEVFNANDVSSLDIYVDGADEINPQKMMIKGGGAALTREKIVAALAKKFICIVDSSKQVDVLGSTFPLPVEVIPMARSQVGRKLAALGGSPEYREDVVTDNGNVILDVHNFSILNPVEMEKELNNVAGVVTNGIFALHGADVVIVGTPEGAKVID

SEQ ID NO: 973 - DNA, 1233 bp, Haemophilus influenzae
atgacaaacaaagtctctctagacaaatcaaaaatcaaatttgtattgtttgaaggtgtgcatcaaagcgcacttgatacgctccatgcggcaggctataccaatattgattactataaaaaagcactagatggcgatgaattaaaagaagccattaaagatgcacattttatcggcttgcgttctcgcacccatttaacggcagaaatgattgaggccgcacccaaattaatcgctgtgggatgtttctgtattggtaccaaccaagtggatttaaatgcagcaaaagcgcgtggaattcctgtatttaatgccccattctcaaacactcgttccgtcgcagaactagtattaggcgagattttattacttatgcgcaatgtgccacaggctaatgccgaagtacatcgtggtgtctggaataaatccgcgacgggatcttatgaagtgcgggggaaaaaattaggcattattggttacggtcacattggttcacaattaagtattattgctgaatcattagggatggatgtgtatttctacgatattgaaaacaaacttccactcggtaatgccaaacaggttcgtagccttgaagaattactcagttcttgcgatgtggtttcattacatgtgccagaactgccctctaccaaaaacttaatgaacgcagcacgtatcgcacaattaaaacaaggggcaattttgatcaatgccgcgcgtggcacagtggtagatattgacgctctcgctcaagccttaaaagatgggaaacttcagggtgccgcaattgatgtattccccgttgagcccgcttcaattaatgaagaatttgtctcgccgttacgtgaatttgataatgtgattttaacgccacatatcggcggctcaacagcggaagcacaagaaaatatcggttttgaagtggcaggcaaatttgtcaaatattcagacaatggatcaaccctttcttcggtaaacttcccagaggtctctttaccagaacacgagggaacaaaacgcttattgcatattcacgaaaatcgtcctggtatattgaacaaactgaaccaaattttcgtcgaagctaacctcaatattgcagcgcaatatttacaaactgacccgaaaattggttatgttgtcgtagatgtagaaacgaatgatgcatcgccattactgacgaaattgaaggaaatagatggtacaattcgtgcacgagtgctttactaa

SEQ ID NO: 974 - protein, 410 aa, Haemophilus influenzae
MTNKVSLDKSKIKFVLFEGVHQSALDTLHAAGYTNIDYYKKALDGDELKEAIKDAHFIGLRSRTHLTAEMIEAAPKLIAVGCFCIGTNQVDLNAAKARGIPVFNAPFSNTRSVAELVLGEILLLMRNVPQANAEVHRGVWNKSATGSYEVRGKKLGIIGYGHIGSQLSIIAESLGMDVYFYDIENKLPLGNAKQVRSLEELLSSCDVVSLHVPELPSTKNLMNAARIAQLKQGAILINAARGTVVDIDALAQALKDGKLQGAAIDVFPVEPASINEEFVSPLREFDNVILTPHIGGSTAEAQENIGFEVAGKFVKYSDNGSTLSSVNFPEVSLPEHEGTKRLLHIHENRPGILNKLNQIFVEANLNIAAQYLQTDPKIGYVVVDVETNDASPLLTKLKEIDGTIRARVLY

SEQ ID NO: 975 - DNA, 843 bp, Haemophilus influenzae
atgtctcaatttatttctcttactcaatatcagctgattgaagtacagggtgcggatgcagaaaaatatttgcaagggcaattaacttctgatgttgtgcgattagcaagtggcgcaacgacgcttacagctcactgtgacccaaaaggtaaaatgaatgcaatttatcgtttgtttaaagtaagtagtgaacaattctttttactcgttaagaaagatattttgccaagcggtctggatgctttgaaaaaatatgcggtattttccaaagttagttttgatttacgtgattggcaaatcattggcgtaataggtgaaaaatgtggaaaaattacaccgcacttttcattagaaattgatgaacaacgttcaattttattgaatgaaactgaattgcccgtgaattttaatggcgatgaaaaaatttgggaagtagctgatattcaagcaggattgccaaatttaagtccgcaaacgcaaaatgaatttatcccacaagccctaaatttacaggctattgagcaagccatttcttttaccaaaggttgttatattgggcaagaaacggtggcacgtgcgaaatatcgtggtgcaaacaaacgcgcaatgtttatttttaaagcgcaaactcagcaggaagcgaaaattggcagtgaaattgaaatgcagcttgaagccaattggcgtaagactggcacgattacaagtgcggtcaatttagacggtgttttatggttgcaagttgtgatgaataacgacattgattcagagcaaaaatttaggttgctgaataatgaaatattgttagagcgagtgcagttaccttattcgattactgaataa

SEQ ID NO: 976 - protein, 280 aa, Haemophilus influenzae
MSQFISLTQYQLIEVQGADAEKYLQGQLTSDVVRLASGATTLTAHCDPKGKMNAIYRLFKVSSEQFFLLVKKDILPSGLDALKKYAVFSKVSFDLRDWQIIGVIGEKCGKITPHFSLEIDEQRSILLNETELPVNFNGDEKIWEVADIQAGLPNLSPQTQNEFIPQALNLQAIEQAISFTKGCYIGQETVARAKYRGANKRAMFIFKAQTQQEAKIGSEIEMQLEANWRKTGTITSAVNLDGVLWLQVVMNNDIDSEQKFRLLNNEILLERVQLPYSITE

SEQ ID NO: 977 - DNA, 864 bp, Haemophilus influenzae
atgatttacagtatgaccgcctttgcacgccttgaagtgaaaaaagattggggtgatgcggtatgggaaattcgttccgttaatcaacgttatttagaaaactttttccgtttgcccgagcaatttcgcggattagaaaacacgttgcgtgagaaacttcgtcaaagccttactcgcggtaaaattgaatgttctttgcgtattgaaacaaaaaaacaagcaaatgctgagttgaatttaaataaagagcttgcgaatcaagtgattcaatctttgcaatggattaaagctcaggctggagaaggggaaattaatttgacagacgtgttgcgttatcctggtgtggtggaagcgcaagagcaagatttagatgcgattagtcaagatttattgacagcctttgatgatttactgacagattttattgcaatgcgtggtcgtgagggggaaaaactgaacgacattattcaacaacgtttagattccattgcagtggaaacggataaagtgcggtcacaaatgccagcagttttacaatggcagcgtgaacgtttattgcaacgttttgaagatgctcaacttaatcttgatccgcaacgtgtggaacaagaaatgattttactggctcaacgcgttgatgtggcggaagagctagatcgtttacaaatgcacgtgaaagaaaccacgaatattttgaaaaaaggcggtgcagttggacgtaaattagattttatgatgcaagagttgaatcgtgaatccaatacccttgcgtctaaatccattaatgccgatatcacggcttctgcggtggagctaaaagtgcttattgaacaaatgcgtgagcaaattcagaatttagaatag

SEQ ID NO: 978 - protein, 287 aa, Haemophilus influenzae
MIYSMTAFARLEVKKDWGDAVWEIRSVNQRYLENFFRLPEQFRGLENTLREKLRQSLTRGKIECSLRIETKKQANAELNLNKELANQVIQSLQWIKAQAGEGEINLTDVLRYPGVVEAQEQDLDAISQDLLTAFDDLLTDFIAMRGREGEKLNDIIQQRLDSIAVETDKVRSQMPAVLQWQRERLLQRFEDAQLNLDPQRVEQEMILLAQRVDVAEELDRLQMHVKETTNILKKGGAVGRKLDFMMQELNRESNTLASKSINADITASAVELKVLIEQMREQIQNLE

SEQ ID NO: 979 - DNA, 717 bp, Haemophilus influenzae
  misc_feature 694, 695, 696, 697, 698: n is any nucleotide
atgacaaacacaacaatgcaaccaaaccgccttcgtattgctttgcaaaaaaaagggcgtttaagccaagattgtgccatattacttaaacaatgtggcgtgaaaattaattggaatgaacaacgtttaatcgcttatgcggaaaatttgccgattgaaattcttcgcgtacgtgatgatgatattcctggattgatttttgatggcgtagtggatcttgggattattggcgaaaatgtgttagaagaggaagagcttggtcgccgtgcagcaaatgaaaccgttacatacaaaaaacttcgccaacttgattttggtgattgtcgtctatcacttgcggttgatcgcgattgtcattatgagaatgtgaaagatcttgctaataggcgtattgcaacttcttacccgcatttactcaaacgttatatgaatgagaatggggtgtcgtttaaaagttgtttattaaatggttcagtagaagtcgcacctagtgcgggtattgcttatgcgatttgcgacttagtatcatcaggggcaacgcttgaagcaaatggcttaaaagaagtggacgtgatttatcgttctaaagcttgtttaattcagcgtgctgaaccgcttgaatcaactaaacaagctcttgtggataaactactcactcgtattcaaggttacagcaggcagcagaaagtaaatnnnnncattccattcattaattaa

SEQ ID NO: 980 - protein, 238 aa, Haemophilus influenzae
  VARIANT 232, 233: Xaa is any amino acid
MTNTTMQPNRLRIALQKKGRLSQDCAILLKQCGVKINWNEQRLIAYAENLPIEILRVRDDDIPGLIFDGVVDLGIIGENVLEEEELGRRAANETVTYKKLRQLDFGDCRLSLAVDRDCHYENVKDLANRRIATSYPHLLKRYMNENGVSFKSCLLNGSVEVAPSAGIAYAICDLVSSGATLEANGLKEVDVIYRSKACLIQRAEPLESTKQALVDKLLTRIQGYSRQQKVNXXIPFIN

SEQ ID NO: 981 - DNA, 180 bp, Haemophilus influenzae
  misc_feature 12, 13, 14, 15, 16: n is any nucleotide
atgaatgaatgnnnnncacttaccatcatcaccacacctgattatctttcaggcgtgattgtatgtttggaagataataaaatatcttccgagtgtgataaaaatcagtgtaaaagcaataaatacccccctcggaaggcaattttcgagggggtttcttttatctcaactttaaaatag

SEQ ID NO: 982 - protein, 59 aa, Haemophilus influenzae
  VARIANT 4, 5, 6: Xaa is any amino acid
MNEXXXLTIITTPDYLSGVIVCLEDNKISSECDKNQCKSNKYPPRKAIFEGVSFISTLK

SEQ ID NO: 983 - DNA, 912 bp, Haemophilus influenzae
atgacaaacacaacaatgcaaccaaaccgccttcgtattgctttgcaaaaaaaagggcgtttaagccaagattgtgccatattacttaaacaatgtggcgtgaaaattaattggaatgaacaacgtttaatcgcttatgcggaaaatttgccgattgaaattcttcgcgtacgtgatgatgatattcctggattgatttttgatggcgtagtggatcttgggattattggcgaaaatgtgttagaagaggaagagcttggtcgccgtgcagcaaatgaaaccgttacatacaaaaaacttcgccaacttgattttggtgattgtcgtctatcacttgcggttgatcgcgattgtcattatgagaatgtgaaagatcttgctaataggcgtattgcaacttcttacccgcatttactcaaacgttatatgaatgagaatggggtgtcgtttaaaagttgtttattaaatggttcagtagaagtcgcacctagtgcgggtattgcttatgcgatttgcgacttagtatcatcaggggcaacgcttgaagcaaatggcttaaaagaagtggacgtgatttatcgttctaaagcttgtttaattcagcgtgctgaaccgcttgaatcaactaaacaagctcttgtggataaactactcactcgtattcaaggtgtacagcaggcagcagaaagtaaatatattatgctccacgctccgaaagaaaaacttgaaaaaatcactgcgcttttacctggcgttgaaaatccgaccattttaccattagccactgatacaactcgggtagcaatgcacgtagtgagccaagaaaatttattttgggaaacaatggaacagttaaaagaggcaggagctagttcaattttagtgttaccaattgagaagatgatggagtaa

SEQ ID NO: 984 - protein, 303 aa, Haemophilus influenzae
MTNTTMQPNRLRIALQKKGRLSQDCAILLKQCGVKINWNEQRLIAYAENLPIEILRVRDDDIPGLIFDGVVDLGIIGENVLEEEELGRRAANETVTYKKLRQLDFGDCRLSLAVDRDCHYENVKDLANRRIATSYPHLLKRYMNENGVSFKSCLLNGSVEVAPSAGIAYAICDLVSSGATLEANGLKEVDVIYRSKACLIQRAEPLESTKQALVDKLLTRIQGVQQAAESKYIMLHAPKEKLEKITALLPGVENPTILPLATDTTRVAMHVVSQENLFWETMEQLKEAGASSILVLPIEKMME

SEQ ID NO: 985 - DNA, 1284 bp, Haemophilus influenzae
atgcaaacaattatttggaatcatttatcagaaactgaaaaacgcaaagtcattatgcgtccagtccaacaaaatgggaaaaacattcagcaggcagttaatgccattcgtgaaaatgtggcatacaatggcgatcgggcgttatttgaactctgtgaaaaatttgatggcgtgaagttagataaactcattgtttcggtagatgaaattcaagcggcaagtagtcggatttctgtaaaacttcgcaatgcgattgagcaagccaaaacgaacattgaagcctttcacaaagcacagcaaaatcaggaaattgacctagagatccaagaaggcgtgcgttgccaagttgtgactcgtccaatttcttgtgtagggctttatattccaggtggttcagcaccgctgttttccaccgtattgatgttagctattcctgctaaaattgcaggttgtaaaaaaatcgtgctttgttcaccgccaccgatctcagatgaaattctctacactgctcatctttgcggtgtggaaactatctacgctataggtggtgctcaagcagtttttgcgatggctcaaggcacggaaagtgtggcgaaagtagataaaattttcggacctggaaacgcatttgtgacagaagcaaaacgtcaggtagcacaaaatagtacggcgattgatatgccagcgggaccttcagaagtgttagtaattgcagatgaatcggcagatcctgaatttgtggcaagcgatttactctctcaagcggaacatggggcagatagccaagtgattttggtggcgacctgtcaaactctggcaaaagagaccgcacttgcgactgaacgccaacttgctctattacctcgtgctgaaaccgttcgaaaagcgttaaaccacagccgtatttttatagcagaaagccttgaacaagcggtagaaattagcaatgaatatgcccctgaacatttaattgtgcaaacaaaaaacgcccgtaaattattaccatatttagataacgcaggctcaattttcttaggtgcatattcgcctgaaagtatgggcgattatgccagtggcacaaaccacgttttgcctacttatggttacaccaaaacttattctagtctaggattagctgattttagtaagcgaatgacagtacaagaactcacaccaaaaggttttaaaaaccttgctgaaacggtggaagtgatggcagaagctgagcaattggcagcacataaaatggcagtaagtgtaagattggcgaaactcaatatctaa

SEQ ID NO: 986 - protein, 427 aa, Haemophilus influenzae
MQTIIWNHLSETEKRKVIMRPVQQNGKNIQQAVNAIRENVAYNGDRALFELCEKFDGVKLDKLIVSVDEIQAASSRISVKLRNAIEQAKTNIEAFHKAQQNQEIDLEIQEGVRCQVVTRPISCVGLYIPGGSAPLFSTVLMLAIPAKIAGCKKIVLCSPPPISDEILYTAHLCGVETIYAIGGAQAVFAMAQGTESVAKVDKIFGPGNAFVTEAKRQVAQNSTAIDMPAGPSEVLVIADESADPEFVASDLLSQAEHGADSQVILVATCQTLAKETALATERQLALLPRAETVRKALNHSRIFIAESLEQAVEISNEYAPEHLIVQTKNARKLLPYLDNAGSIFLGAYSPESMGDYASGTNHVLPTYGYTKTYSSLGLADFSKRMTVQELTPKGFKNLAETVEVMAEAEQLAAHKMAVSVRLAKLNI

SEQ ID NO: 987 - DNA, 1059 bp, Haemophilus influenzae
atgacaatcacaactttatcccgacaaaatatacaagccttaacgccatatcaatccgctcgaaaactcggcggcaatggtacgatttggctgaatgcaaatgaatatccaacttcacctgaatttcagctttcgggtaaggatttaaaccgctaccccgaacctcagcctcaaagagtggtacaggcttatgcgaattatgcgggcgtttcaactgaaaatgtactcgttactcgtggcggtgatgaaggcattgaattaataatccacactttttgcgaacccaaacaagatgccattttattctgtcctccgacttacggaatgtatgcagtgagtgctgaaacggcaggtgtgctaagtaagaccgtgcctttaactgacgattttcagcttaatttgccagaaatcaaaaatcatcttaatgatgtaaaagtagtctttgtatgcagcccaaataatccgacaggtaatttgctcaagcaatcagatatactcgatcttttgcaaatcacggcaggcaaagcgattgtggtggtggacgaagcctatattgagttctgtcctgaagcaagctttattaatttgcttaaaaattacccgcacttagccattatccgcacgctctctaaagcctttgctttagctggattgcgttgtggttttgtgttagcaaaccctgcgctaattgacatcttaagtaaggtaatcgctccatatcctatccctgtgccaagtgctgatcttgcggaacaagcgttaagacctgcgaacatcgccactgttcaagctctcacacaagaacttctttccaatcgtcaatggcttgctaaagctcttttagttttacatcaagtggaaaaagtgtatgaaagtgaagctaattatctgttgatcaaatgtcaaaacgggcaagctgtgtttaaggcattgtgggaacaaggaattattttaagagaccagaataagacattgcatttacaaaattgtattcgcattactgtgggaacaaggaatgagtgtgagagagttgttgaagcaattaaggaggtaaaatga

SEQ ID NO: 988 - protein, 352 aa, Haemophilus influenzae
MTITTLSRQNIQALTPYQSARKLGGNGTIWLNANEYPTSPEFQLSGKDLNRYPEPQPQRVVQAYANYAGVSTENVLVTRGGDEGIELIIHTFCEPKQDAILFCPPTYGMYAVSAETAGVLSKTVPLTDDFQLNLPEIKNHLNDVKVVFVCSPNNPTGNLLKQSDILDLLQITAGKAIVVVDEAYIEFCPEASFINLLKNYPHLAIIRTLSKAFALAGLRCGFVLANPALIDILSKVIAPYPIPVPSADLAEQALRPANIATVQALTQELLSNRQWLAKALLVLHQVEKVYESEANYLLIKCQNGQAVFKALWEQGIILRDQNKTLHLQNCIRITVGTRNECERVVEAIKEVK

SEQ ID NO: 989 - DNA, 1089 bp, Haemophilus influenzae
atgcaacctactctttttatcgaccgagacggcacattaattgatgaaccaaaaactgatttccaaattgacagtttagagaaactaaaattagaaccgaaagtgattcccgcactcctcagactgaaagcgaaataccgttttgtgatagtttctaatcaagatgggcttggtacggatgcttttccgcaaacaaattttgataaaccccacaatgtaatgatggcattatttgaatctcagggcattacctttgatgaagtactcatttgcccgcataagcccgaagaaaattgtctatgtcgcaaaccaaaaattaagttgcttgatcactatattcgtaaaaatttattcgatattgaccgctcttttgtcattggtgaccgagagaccgatgtgcaattagcagaaaatctaggtattcgagctattcaatacgatccacagaaaatgaattgggatctgattgcagaaaaattgttgggggaaacggtcacaaactgtggcaaacgtccgccacgttttgcagaagtaattcgtcaaactaaagagaccgatattaaagtgcaggtttggctagatgaagctggtgtaaatgaaatcaaaaccggcgttggtttttttgaccatatgctcgatcaaatcgccacacacggtgggtttagaatgaacgtgcagtgtaaaggcgatttatggattgacgaacatcacacggtggaggacaccgctctcgcccttggacaagcactgaaacaagccattggtgacaaacgtggtattgcccgtttcggctttgtgcttccaatggacgaatgtaaagcagaatgtgctttagatttatcgggcagaccttggatcaaattcaatgcctgctttaaacgcgataaagtgggcgattttagtacggaactcactgaacatttctttcaatctttggcattttcaatgcttgccacgcttcatttaaatgtcatgggtaataacgatcatcataaaatagagagcttatttaaagcctttgggagaacattaagacaggcgattcggattgaaggaaatgaaatgccaagttcaaaaggagttttatag

SEQ ID NO: 990 - protein, 362 aa, Haemophilus influenzae
MQPTLFIDRDGTLIDEPKTDFQIDSLEKLKLEPKVIPALLRLKAKYRFVIVSNQDGLGTDAFPQTNFDKPHNVMMALFESQGITFDEVLICPHKPEENCLCRKPKIKLLDHYIRKNLFDIDRSFVIGDRETDVQLAENLGIRAIQYDPQKMNWDLIAEKLLGETVTNCGKRPPRFAEVIRQTKETDIKVQVWLDEAGVNEIKTGVGFFDHMLDQIATHGGFRMNVQCKGDLWIDEHHTVEDTALALGQALKQAIGDKRGIARFGFVLPMDECKAECALDLSGRPWIKFNACFKRDKVGDFSTELTEHFFQSLAFSMLATLHLNVMGNNDHHKIESLFKAFGRTLRQAIRIEGNEMPSSKGVL

SEQ ID NO: 991 - DNA, 600 bp, Haemophilus influenzae
atgacaaacatcacgattatagacacaggttgtgccaacctttcttctgtaaaattcgcctttgaccgattaggttacaataccgagatcacttttgatcttaataaaatcaaatctgccgataagctgattttacctggcgtaggcactgcaaatgcagcaatgtataatttacaagaacgtcaattgatcgaaaccattcaaaatctaacacaaccagtgctaggaatttgtttgggtatgcagttaatgaccgaattttccgaagagggtaatgtgccgaccttaaacctaataagcggaaaaactaatcgaattcccgatacgggtttaccgttacctcaaatgggatggaatcgcgtgcaatttgtaaaaaactgtccgttatttgatggtattgtgcaaaatagtcacttctattttgtgcatagttatgcagttagcccgaatgaacattcggtggcaataagcaattatggtgtgaatttttctgctgcgatagcgaaagaaaatttttacggtgtacaatttcatcccgaacgttcgggtaaaaatggtgcgttgttgctaaaaaattttgtggaaaaagtaccgttttaa

SEQ ID NO: 992 - protein, 199 aa, Haemophilus influenzae
MTNITIIDTGCANLSSVKFAFDRLGYNTEITFDLNKIKSADKLILPGVGTANAAMYNLQERQLIETIQNLTQPVLGICLGMQLMTEFSEEGNVPTLNLISGKTNRIPDTGLPLPQMGWNRVQFVKNCPLFDGIVQNSHFYFVHSYAVSPNEHSVAISNYGVNFSAAIAKENFYGVQFHPERSGKNGALLLKNFVEKVPF

SEQ ID NO: 993 - DNA, 750 bp, Haemophilus influenzae
atgaaacaatctattattatccctgctcttgatcttatcaatggtcaagttgtgcggttacaccaaggcgattatgccaagcaaactacctattctgacaatccaattaagcaatttgataattatgtacgtcaaggagcaaaacaactacatctagtcgatttaacgggagcgaaaaatccccaatcaagacaaaccgcacttattggaaaaatcgttgaagcaacacaatgtaaagtacaagtgggaggaggcattcgtacagagcaagatgtggcagatttattggctgtgggtgcgaatcgcgtggtgattggttcaaccgccgtaactcatcgttcaatggtaaaaaactggttcatcaaatatggtgcggaaaaatttgttctagcattagacgtgaatattaatgcaagcggtcagaaaattgttgcgattagcggttggcaggaagaaagtggtgtactattagaaacgttgatcgaagatttccaaaccgttggcttacaacaagttttatgtaccgatatttcacgcgatggcaccttgacaggttcaaatattggactttatcaagaaatttgtgagaaatatccacctattcagtttcaatcttctggagggattggttcactggctgatattgaggctctaaaaggcacaggtgtgtcaggtgtaattgtaggtcgcgctttattagaaggaaaatttacgctttcggaggcaatcaaatgttggcaaaacggataa

SEQ ID NO: 994 - protein, 249 aa, Haemophilus influenzae
MKQSIIIPALDLINGQVVRLHQGDYAKQTTYSDNPIKQFDNYVRQGAKQLHLVDLTGAKNPQSRQTALIGKIVEATQCKVQVGGGIRTEQDVADLLAVGANRVVIGSTAVTHRSMVKNWFIKYGAEKFVLALDVNINASGQKIVAISGWQEESGVLLETLIEDFQTVGLQQVLCTDISRDGTLTGSNIGLYQEICEKYPPIQFQSSGGIGSLADIEALKGTGVSGVIVGRALLEGKFTLSEAIKCWQNG

SEQ ID NO: 995 - DNA, 777 bp, Haemophilus influenzae
atgttggcaaaacggataattccttgtttggatgtacgtgatggacaggtggtaaaaggggtacaattccgtaaccacgaaattattggcgatattgtgccacttgctcaacgctatgcgcaagaaggagctgatgaattggtattttatgatattacggcttcatcagacggtcgtaccgtggataaaagttgggtagaacgaatcgctcaggtaattgatattccgttttgcgtagcaggtgggattaaaaccattgaagatgcggaaaaattgtttacatttggggcggataaaatttcgattaattcccctgctctcgctgatccaacgctcatttctcgcttagcagatcgttttggcgtacaagcgattgtagtaggtattgatagttggtttgaacaggaaacaggtaagtattgggtaaaccaatatacaggcgatgaaacacgtacccgacaaactcattggcagttgttagattgggtaaaagaagtacaacaatgcggtgcaggagaaatcgtgctaaatatgatgaatcaagatggtgtacgaaacgggtacgatttagcccagctcaagctggtgcgaggagtatgtagagtacctctaattgcatctggcggtgcgggtaaaatggtacattttcgtgatgcttttattgaagcaaaagttgatggggcattagctgccagcgtattccataaacagattattgaaattggcgagttaaaatcctaccttgtgaaatcagccatcgagattcggagtgaataa

SEQ ID NO: 996 - protein, 258 aa, Haemophilus influenzae
MLAKRIIPCLDVRDGQVVKGVQFRNHEIIGDIVPLAQRYAQEGADELVFYDITASSDGRTVDKSWVERIAQVIDIPFCVAGGIKTIEDAEKLFTFGADKISINSPALADPTLISRLADRFGVQAIVVGIDSWFEQETGKYWVNQYTGDETRTRQTHWQLLDWVKEVQQCGAGEIVLNMMNQDGVRNGYDLAQLKLVRGVCRVPLIASGGAGKMVHFRDAFIEAKVDGALAASVFHKQIIEIGELKSYLVKSAIEIRSE

SEQ ID NO: 997 - DNA, 666 bp, Haemophilus influenzae
atgaatattactaaaatagactggcaaaaagttaatggtcttcttcctgttattattcaaaatataagtactcgtgaggtactaatgcttggctatatgaatgaagaagcccttacaaaaaccatcaaagaacgtaaagtaactttcttctctcgtaccaaacaacgattatggacaaaaggagaaatctcgggcaattttttaaatgtggaagaaatgagcttagattgcgataacgacactttgctcattttagttgatcccattggggcaacttgccacacaggtgaatacagctgcttccatcaatttacctctccacaatcagagaacaagaagcaacaatttgcaaattgggcgtggtttataaaattagaacaacatttaaaagaaaagaaaaatgcagatccttctaattcttatactgcaacattacacgcaaaaggtaccaaaaaaatcgcccaaaaagtgggggaagaaggtgtggaaactgccttggctgcggtcgcacaagataaagcagaagtcatttctgaagctacagatttggtctatcacttaaccgtattattacacaatcaagatcttcagtggtacgaaattatcgcaaaactacaagaacgccatcaagggattggattacatccagaaggaggaaataaataa

SEQ ID NO: 998 - protein, 221 aa, Haemophilus influenzae
MNITKIDWQKVNGLLPVIIQNISTREVLMLGYMNEEALTKTIKERKVTFFSRTKQRLWTKGEISGNFLNVEEMSLDCDNDTLLILVDPIGATCHTGEYSCFHQFTSPQSENKKQQFANWAWFIKLEQHLKEKKNADPSNSYTATLHAKGTKKIAQKVGEEGVETALAAVAQDKAEVISEATDLVYHLTVLLHNQDLQWYEIIAKLQERHQGIGLHPEGGNK

SEQ ID NO: 999 - DNA, 1203 bp, Haemophilus influenzae
atgaacaaaactgtaggcagcacacttcttgttgctggtacgatgattggcgcgggaatgttggctatgccactcacttccgctggcattggcttcggctttactttagtcttgttattggggctttgggcattattaacttttagcgcacttttattcgttgaactctatcaaactgcggaaagtgatgcaggtatcggcacacttgcagaacaatattttggtaaagcaggacgcattattgccacagccgtgctaattattttcttatatgcattaattgccgcttatatcagcggtggcggttcactactaaaagatttattaccagaaagttttggcgataaagttagcgtcttattatttaccgtgattttcggttcatttattgtcatcggcacacatagcgtagataaaattaatcgcgtgttatttttcgttatgcttgctgtctttgccgtggtgttaagcttaatgttgccagaaatcaaatttgataacttaatggcgacgccaattgataaggctttaattatctctgcaagccctgtatttttcacggcgtttggtttccacggttccattccaagtttaaataaatacttagatggcaatgtaaaagcattgcgcttctctattttggtcggctctgccataacactttgcgcttatattctatggcaactatccacgcacggcttgcttacacaaaatgaatttttacaaatcttaaaagaagatgcgactttaaatggcttagtaaaagcaaccttcgccatcactggaagcaatgtgatcgcaagtgcggtaaaattattttctacattagcacttatcacttctttcttaggtgtgggattaggattgttagaatgtattgaagatttactaaaacgttcatttaacgttacagcaggcagaatttcacttggtttactgacttttattccaccacttgtttttgcattattttacccagaaggttttattttagcactaggctacgcaggtcaaatgtttgcattctacgccgtagtattgccagttagccttgtttggaaagctcgtcgtgcccacgctaatttgccatataaagtgtggggaggaaatctgactttaattatcgtattggtattaggcgtgctcattacatccattccatttgcgattcgtgcgggttatttaccctttgttgtaggttaa

SEQ ID NO: 1000 - protein, 400 aa, Haemophilus influenzae
MNKTVGSTLLVAGTMIGAGMLAMPLTSAGIGFGFTLVLLLGLWALLTFSALLFVELYQTAESDAGIGTLAEQYFGKAGRIIATAVLIIFLYALIAAYISGGGSLLKDLLPESFGDKVSVLLFTVIFGSFIVIGTHSVDKINRVLFFVMLAVFAVVLSLMLPEIKFDNLMATPIDKALIISASPVFFTAFGFHGSIPSLNKYLDGNVKALRFSILVGSAITLCAYILWQLSTHGLLTQNEFLQILKEDATLNGLVKATFAITGSNVIASAVKLFSTLALITSFLGVGLGLLECIEDLLKRSFNVTAGRISLGLLTFIPPLVFALFYPEGFILALGYAGQMFAFYAVVLPVSLVWKARRAHANLPYKVWGGNLTLIIVLVLGVLITSIPFAIRAGYLPFVVG

SEQ ID NO: 1001 - DNA, 429 bp, Haemophilus influenzae
atggcgacatttaatttaacaatagtaagcgcagagcagaaaatctttgaaggtgaagtaaaacaaattcaggtaactggtgtggaaggggagcttggtattttgcccggacatacgccattgctaacagcaattaagcctgggattgttaaatttactcttaaagatgggaatgaagaagttatctatgtttctggtggttttttagaagttcaaccaaatattgtgacagtattagcagatattgctattcgaggtagtgaattagatgcagatcgtattcacgaagcaaaacgtaaagcagaagaaaatatagtatctcacggatctgatgtagatcacgacttacttgttgcaaaactttctaaagagttagcaaaacttcgagcttatgaactcactgaaaaactattgaaaacaagacgataa

SEQ ID NO: 1002 - protein, 142 aa, Haemophilus influenzae
MATFNLTIVSAEQKIFEGEVKQIQVTGVEGELGILPGHTPLLTAIKPGIVKFTLKDGNEEVIYVSGGFLEVQPNIVTVLADIAIRGSELDADRIHEAKRKAEENIVSHGSDVDHDLLVAKLSKELAKLRAYELTEKLLKTRR

SEQ ID NO: 1003 - DNA, 1374 bp, Haemophilus influenzae
atgtcagcaggaaaaattgtacaaatcatcggtgcggtgattgacgttgaatttccacaagatgcagtgccaaaagtttacgatgcattaaaagttgaatcaggtttaacacttgaggtgcaacaacaattaggtggcggagtagttcgttgtattgcattgggtacatctgatggtttaaaacgtggcttaaaagtagaaaacacaaataacccaattcaagtaccagtaggcacaaaaacacttggtcgtattatgaatgtgttgggcgaaccaattgacgaacaaggagcaattggtgaagaagagcgttgggctatccaccgttcggcaccgagctatgaagaacaatcaaacagtacggaattattagaaactggtatcaaagtgatcgacttaatttgtccattcgcaaaaggtggtaaagttggtttatttggcggtgcaggtgtaggtaaaaccgtaaatatgatggagttgattcgtaatattgcgattgagcattcaggttactctgtatttgcgggtgtaggcgaacgtactcgtgaaggtaatgatttctatcatgaaatgaaagattctaacgtattagataaagtatctttggtttatggtcaaatgaacgagccaccaggtaaccgtttacgtgttgcattgactggtttaactatggctgaaaaattccgtgatgaaggtcgagatgtattattctttgtggataatatctatcgttatacccttgctggtacggaagtatctgcgttattaggtcgtatgccatccgcggtaggttatcaaccaacccttgccgaagaaatgggtgttctgcaagagcgtattacttcaaccaaaacaggttctatcacttctgtgcaagcggtgtacgtacctgcggatgacttaactgacccatctccagcaacaactttcgcacatttagactcaactgttgtattaagtcgtcaaatcgcatctttaggtatttaccctgcagttgatccattagattcaacttcacgtcagttagacccgcttgttgttggtcaagaacattatgatgttgctcgtggtgtacaaggtattttacaacgttataaagaattgaaagatattatcgcaattcttggtatggatgaattatctgaagaagataaattagtggtagcacgtgcacgtaaaattgaacgtttcttatcacaaccattctttgttgcagaagtcttcacaggttcaccaggtaaatacgtgacattaaaagacaccatccgtggcttcaaaggtatcttagatggcgaatatgaccatattcctgaacaagcgttctatatggttggttcaatcgatgaagtgttagaaaaagccaaaaatatgtaa

SEQ ID NO: 1004 - protein, 457 aa, Haemophilus influenzae
MSAGKIVQIIGAVIDVEFPQDAVPKVYDALKVESGLTLEVQQQLGGGVVRCIALGTSDGLKRGLKVENTNNPIQVPVGTKTLGRIMNVLGEPIDEQGAIGEEERWAIHRSAPSYEEQSNSTELLETGIKVIDLICPFAKGGKVGLFGGAGVGKTVNMMELIRNIAIEHSGYSVFAGVGERTREGNDFYHEMKDSNVLDKVSLVYGQMNEPPGNRLRVALTGLTMAEKFRDEGRDVLFFVDNIYRYTLAGTEVSALLGRMPSAVGYQPTLAEEMGVLQERITSTKTGSITSVQAVYVPADDLTDPSPATTFAHLDSTVVLSRQIASLGIYPAVDPLDSTSRQLDPLVVGQEHYDVARGVQGILQRYKELKDIIAILGMDELSEEDKLVVARARKIERFLSQPFFVAEVFTGSPGKYVTLKDTIRGFKGILDGEYDHIPEQAFYMVGSIDEVLEKAKNM

SEQ ID NO: 1005 - DNA, 870 bp, Haemophilus influenzae
atggcaggtgcaaaagagataaaaaccaaaattgccagtgtacaaagtacacaaaaaatcactaaggcaatggaaatggtggcaacctcgaaaatgcgtaaaacgcaggatcgtatggctgcatctcgtccgtattctgaaactatccgtaacgttattagtcatgtgtctaaggcaagtatcggttataaacatccgttcttagttgagcgcgaagtgaagaaaatcggtatcttggttatttcaacagatcgtgggatgtgtggtgggttaaatgttaatttattcaaaaccatacttaaccaaataaaaaattggaaagaacaaaatatttctacagatttgggcttaataggttcaaaagggattagttttttccgttcctttggatttaatatcaaaggtcagctttctggtttaggcgatacgcccgctctagaagagttaattggtgtggcaaatacaatgtttgatgcttatcgtaatggtgaaattgatgcaatttatattgcatacaataaatttgttaatacgatgtcgcaaaagcctgttgtacaacaattagttcctttaccagaatctaaagacgatcatttaaatgaaagacaacagacttgggattatctttatgagccagaaccaaaagtactattagatagccttttagttcgttatttagaatcccaaatttatcaagcggttgtagataatttagcttcagaacaagcggctcgaatggtagcaatgaaagcagcaacggataatgcaggtaatttaattaatgatctgcggttggtgtacaacaaagctcgtcaagcaagtatcacaaatgaattgaatgaaatcgtagccggtgcggcggcgatttaa

SEQ ID NO: 1006 - protein, 289 aa, Haemophilus influenzae
MAGAKEIKTKIASVQSTQKITKAMEMVATSKMRKTQDRMAASRPYSETIRNVISHVSKASIGYKHPFLVEREVKKIGILVISTDRGMCGGLNVNLFKTILNQIKNWKEQNISTDLGLIGSKGISFFRSFGFNIKGQLSGLGDTPALEELIGVANTMFDAYRNGEIDAIYIAYNKFVNTMSQKPVVQQLVPLPESKDDHLNERQQTWDYLYEPEPKVLLDSLLVRYLESQIYQAVVDNLASEQAARMVAMKAATDNAGNLINDLRLVYNKARQASITNELNEIVAGAAAI

SEQ ID NO: 1007 - DNA, 1542 bp, Haemophilus influenzae
atgcaactaaattcaactgaaattagtgaattgattaaaaaacgcatcgctcaattcgacgtggtcagtgaagcgcgtaatacagggacaattgtttctgtaagcgatggtattattcgcatccacggtttaagcgatgtgatgcaaggtgaaatgatcgccttaccaggtaatcgttatgcgatggcacttaaccttgaacgcgattctgttggtgctgtagttatgggaccttacgcagatttagcggaaggtatggaagttcaatgtacaggtcgtattcttgaagtaccagttggtcgtggtttattaggtcgtgtagttaatacgcttggtcagccaatcgatggtaaaggagaaattgaaaatgatggtttctcaccagtagaagtgattgcgccaggtgttatcgatcgtcgttctgttgatcaacctgttcaaactggttataaagctgtcgattccatggtaccgattggtcgtggtcagcgtgagttaatcatcggtgaccgtcaaacgggtaaaactgcgttagcaattgacgctattattaatcaacgtaattcaggtattaaatgtatctatgttgcgattggtcaaaaagcttctactattgcaaacgtcgtgcgtaaattagaagaacatggtgcgcttgcaaatactatcgtggtagctgcatctgcatctgaatcagcagcgttacaatatttagccccttatgctggttgtgcgatgggggaatatttccgtgatcgcggcgaagatgcgttaattgtttatgatgatttatcaaaacaagccgtagcttatcgtcaaatttcattattattacgtcgtccaccaggtcgtgaagcctatccaggtgatgtgttctatttacattctcgtttactagaacgtgcttctcgtgtaaatgaagattatgtagaaaaattcactaaaggcgaagtaaaaggaaaaacaggttctttaaccgcacttccgattattgaaacccaagctggtgacgtatctgcgtttgttccaaccaacgtaatttctattaccgatggtcagatcttcttagaatctaacttgtttaactcaggtattcgtcctgcggtaaacccaggtatttcggtatctcgtgttggtggttcagcgcaaactaaagttattaagaaattagcgggtggtattcgtaccgcgctagctcaatatcgtgaattagcagcgtttgcacagtttgcatcagatctagatgatgcgactcgtaagcaactttctcacggtgaaaaagtaactgaattattaaaacaaaaacaattcgcgccattatctgttgcagaacaagcggttgtattgtttgctgttgaatttggttatttggatgacgtggaattatcaaaaattgcaagttttgagaccgcacttttagattattctaaccgtaatcacgctgaatttatgcaagagcttaataaaaccggtaactataatgatgaaatcaaagatacgttaaaaagtattttagatggttttaaagcgaatagtgcttggtag

SEQ ID NO: 1008 - protein, 513 aa, Haemophilus influenzae
MQLNSTEISELIKKRIAQFDVVSEARNTGTIVSVSDGIIRIHGLSDVMQGEMIALPGNRYAMALNLERDSVGAVVMGPYADLAEGMEVQCTGRILEVPVGRGLLGRVVNTLGQPIDGKGEIENDGFSPVEVIAPGVIDRRSVDQPVQTGYKAVDSMVPIGRGQRELIIGDRQTGKTALAIDAIINQRNSGIKCIYVAIGQKASTIANVVRKLEEHGALANTIVVAASASESAALQYLAPYAGCAMGEYFRDRGEDALIVYDDLSKQAVAYRQISLLLRRPPGREAYPGDVFYLHSRLLERASRVNEDYVEKFTKGEVKGKTGSLTALPIIETQAGDVSAFVPTNVISITDGQIFLESNLFNSGIRPAVNPGISVSRVGGSAQTKVIKKLAGGIRTALAQYRELAAFAQFASDLDDATRKQLSHGEKVTELLKQKQFAPLSVAEQAVVLFAVEFGYLDDVELSKIASFETALLDYSNRNHAEFMQELNKTGNYNDEIKDTLKSILDGFKANSAW

SEQ ID NO: 1009 - DNA, 534 bp, Haemophilus influenzae
atgtcagaattaactacaatagctcgcccttatgcaaaagctgcattcgactttgccattgaacaaagtgcggtcgaaaaatggactgaaatgttaggttttgctgctgccgtagctgaagatgaaacggtgaaagcttacttaagtagttctctttctgcacagaaattagctgatacagtaatttctatttgtggcgaacaattggatcaatatgggcaaaatcttattcggttaatggctgaaaataagcgtttgagtgctattcctgcggtgtttgaagaatttaaacatcacgtagaagaacaccaagctattgcagaagttgaagtaacatctgcgcaaccattgaatgcaacacaaatcgaaaaaattgcagctgcaatggaaaaaagattagctcgcaaagtgaaattaaattgcaacgtggataacgcacttattgctggtgtgattgttcgtactgaagactttgtgattgacggaagtagccgtgggcaacttactcgtctcgcaaacgagttgcaattataa

SEQ ID NO: 1010 - protein, 177 aa, Haemophilus influenzae
MSELTTIARPYAKAAFDFAIEQSAVEKWTEMLGFAAAVAEDETVKAYLSSSLSAQKLADTVISICGEQLDQYGQNLIRLMAENKRLSAIPAVFEEFKHHVEEHQAIAEVEVTSAQPLNATQIEKIAAAMEKRLARKVKLNCNVDNALIAGVIVRTEDFVIDGSSRGQLTRLANELQL

SEQ ID NO: 1011 - DNA, 471 bp, Haemophilus influenzae
gtgaatttaaatgcaacattgattggtcaacttatcgcattcgcacttttcgtgtggttttgcatgaagtttgtttggccaccaattattaatgcgattgaaacacgtcaaagccaaattgcgaacgctttagcgtcagctgaagcagctaaaaaagagcaagcagatacgaaaaatcttgttgaacaagaactttcagctgcaaaagtacaagctcaagaaattttagatgcagcgaataaacgtcgcaatgaagtattagacgaagtgaaggcggaagccgaagaactaaaagcaaaaattattgctcaaggttatgcagaagtagaagcagaacgtaaacgtgttcaagaagaattacgtcttaaagtggcttcattggctgtggctggtgctgagaaaattgtgggtcgttctattgatgaagcggcaaacaatgacattattgataaattagttgcagagttataa

SEQ ID NO: 1012 - protein, 156 aa, Haemophilus influenzae
MNLNATLIGQLIAFALFVWFCMKFVWPPIINAIETRQSQIANALASAEAAKKEQADTKNLVEQELSAAKVQAQEILDAANKRRNEVLDEVKAEAEELKAKIIAQGYAEVEAERKRVQEELRLKVASLAVAGAEKIVGRSIDEAANNDIIDKLVAEL

SEQ ID NO: 1013 - DNA, 255 bp, Haemophilus influenzae
atggaaactgtaattacagcgacaatcatcggtgcatcaattcttcttgcatttgctgcattaggtactgcaattggctttgctattctaggtggtaaattcttagaatcatcagctcgccaaccagaattagcatctagcttacaaactaaaatgtttatcgtagctggtcttttagatgcgattgcaatgattgctgttggtatttcattacttttcattttcgcaaacccattcatcggtttattaaactaa

SEQ ID NO: 1014 - protein, 84 aa, Haemophilus influenzae
METVITATIIGASILLAFAALGTAIGFAILGGKFLESSARQPELASSLQTKMFIVAGLLDAIAMIAVGISLLFIFANPFIGLLN

SEQ ID NO: 1015 - DNA, 789 bp, Haemophilus influenzae
atgtctggacaaacaacatcggaatacattagccaccatttatcctttctcaaaacaggggatggattttggaatgttcatatagatacgttgttcttttctattcttgctgcggttattttcctatttgttttttctcgagtagggaaaaaagcaacaactggcgttccaggaaaaatgcaatgcttagttgaaattgttgtggaatgggttaatggaatcgtgaaagaaaattttcatggtccacgtaacgtagttgcgccacttgcattaacaattttctgttgggtattcatcatgaatgctatcgacttaattcctgttgatttcttacctcaatttgcaggtttgttcggtattcattatcttcgtgcagtgccgacagcagatattagcgcaactttgggtatgtccatttgtgttttctttttaattcttttctacacaataaaatctaaaggattcaaaggtttagttaaagaatatacgcttcatccattcaatcattgggcgtttattcctgttaattttattcttgaaacggtgactttattggctaaaccaatttcacttgctttccgtttgttcggtaacatgtatgcaggggagttgatctttattcttatcgctgtaatgtattccgctaatatggccattgcagcattagggattccgttacatcttgcttgggctattttccatattttggttattaccttgcaggctttcatctttatgatgttgacggttgtttatttaagtattgcttataacaaagcagatcattaa

SEQ ID NO: 1016 - protein, 262 aa, Haemophilus influenzae
MSGQTTSEYISHHLSFLKTGDGFWNVHIDTLFFSILAAVIFLFVFSRVGKKATTGVPGKMQCLVEIVVEWVNGIVKENFHGPRNVVAPLALTIFCWVFIMNAIDLIPVDFLPQFAGLFGIHYLRAVPTADISATLGMSICVFFLILFYTIKSKGFKGLVKEYTLHPFNHWAFIPVNFILETVTLLAKPISLAFRLFGNMYAGELIFILIAVMYSANMAIAALGIPLHLAWAIFHILVITLQAFIFMMLTVVYLSIAYNKADH

SEQ ID NO: 1017 - DNA, 378 bp, Haemophilus influenzae
gtgatgtcgcgcattttatctcacgctaaaaaaaactacagaaaagctattgttattgagagtcttttgcttgtagttttttatttgtttatttatggatggcaacgccaaagtgcggtagattttagctacggttttttaagtgcctttttgcctttttgtacatttatatttatcattttttacagaaaacaaaatttttcaacaaaactgaccgcactttatcgtgctgaagcaataaagtttattttaacgatgatttttatcattattgccatcaaatggttattcgttatcaattttattgcgttttttgttggttttttattggcattagtgctgaataatattattccacttattctcaataaaatttaa

SEQ ID NO: 1018 - protein, 125 aa, Haemophilus influenzae
MMSRILSHAKKNYRKAIVIESLLLVVFYLFIYGWQRQSAVDFSYGFLSAFLPFCTFIFIIFYRKQNFSTKLTALYRAEAIKFILTMIFIIIAIKWLFVINFIAFFVGFLLALVLNNIIPLILNKI

SEQ ID NO: 1019 - DNA, 612 bp, Haemophilus influenzae
atgaaagccaaattagtcagtttacttgcgcaagcaaatataaaaataagtgatcaacaaattcagcagttgattaatctggtcaatttactcaataaatggaataaagcttataatttgacgtcagttcgtgatcctcaagaaatgttagttaaacatattttagatagtcttgttgtaagtccttatttacaaggtgatcgttttattgatgtcggtacagggcctggtttgcctggtttacctttggcaattattaatccttccaaacaatttgtcctccttgatagcttaggtaagcgtattagttttattcgaaatgctatacgtgagcttagactaactaatgtaacccccgttttaagtcgagtagaagaatatcaacctgaagataaatttgatggcgtattaagtcgtgcttttgcttcactaaaagatatgacagattggtgccatcatttaccaaaagaaaatggatatttttatgcattaaaagggatttatcaggaagatgaaattaatgaattgaataaaaaatatactattcaaaaagtgattgaattatctgttcctgaacttataggcgaacgacatttaatcgttttacgttaa

SEQ ID NO: 1020 - protein, 203 aa, Haemophilus influenzae
MKAKLVSLLAQANIKISDQQIQQLINLVNLLNKWNKAYNLTSVRDPQEMLVKHILDSLVVSPYLQGDRFIDVGTGPGLPGLPLAIINPSKQFVLLDSLGKRISFIRNAIRELRLTNVTPVLSRVEEYQPEDKFDGVLSRAFASLKDMTDWCHHLPKENGYFYALKGIYQEDEINELNKKYTIQKVIELSVPELIGERHLIVLR

SEQ ID NO: 1021 - DNA, 378 bp, Haemophilus influenzae
atgcggttatttaagcaactagaacgttggaaaattcgcaagcaaataaatcaatctattattgatgtgatatttcgtttacgaaatcgattagctcattactggcaagctgatgtgaatacgcctcaagtggattttatgctgctacacattgcttgcagcttaggtcgaatagaacgaggaggttgtgtttctccgctttattcagaaatgctcgaagaaatgcaaagtgcggtcatttttccacaagttttagctattcatcaagatttactcaagttaatgccactttccattcctgaagcagaacaaacttattttttagcgaacattcattctttggttcttgaacagaagcaattaaagcctttgaaatga

SEQ ID NO: 1022 - protein, 125 aa, Haemophilus influenzae
MRLFKQLERWKIRKQINQSIIDVIFRLRNRLAHYWQADVNTPQVDFMLLHIACSLGRIERGGCVSPLYSEMLEEMQSAVIFPQVLAIHQDLLKLMPLSIPEAEQTYFLANIHSLVLEQKQLKPLK

SEQ ID NO: 1023 - DNA, 603 bp, Haemophilus influenzae
atgttagattacgagatcttcaatccatatgaaggattgatttttgatatggatggaactttaattgataccatgcccgtgcatgcgcaggcttggacaatggtgggaaagaaatttggctatgaatttgattttcaaattatgtataacttcggcggggcgacggttcgaactatcgcgggggaaatgatgaaagcggcgaatatgccactagatcgaattgaggatgtgctggctgcaaaacgtgagttgtcttatcaacttattccgactcaatcaaagttattgccaacctttgaaattgttaaatccttccatcagaaaaagccgattgctttaggttctggctcacaccgtaaaattattgatatgttgatggataaactggctatcgcaccttactttaatgcaattgtcagtgcagatgatgtaaaagaacataaaccacacccagaaacttttttacgttgtgcggagttaattcaagcaaatccaagtcgttgtatcgtatttgaagatgcggatttaggcgtgcaagcaggattaagtgcgggaatggatgtgtttgatgttcgcacacgagaaattatttcgccaagataa

SEQ ID NO: 1024 - protein, 200 aa, Haemophilus influenzae
MLDYEIFNPYEGLIFDMDGTLIDTMPVHAQAWTMVGKKFGYEFDFQIMYNFGGATVRTIAGEMMKAANMPLDRIEDVLAAKRELSYQLIPTQSKLLPTFEIVKSFHQKKPIALGSGSHRKIIDMLMDKLAIAPYFNAIVSADDVKEHKPHPETFLRCAELIQANPSRCIVFEDADLGVQAGLSAGMDVFDVRTREIISPR

SEQ ID NO: 1025 - DNA, 474 bp, Haemophilus influenzae
atggatattttttcattttttagtgctgatttttggcagactaatagcttatgctttatgtttatcagcgcgtttttgagtgcaacagtattaccaggtaattcagaagttatatttgttgcgcttgctgtacctaaattaatgttaggttctttatttaacgcagatatattagctctaatattgattgcaaccgctggaaatagcttaggaagtttaaccacttacggaattggacgatggatgccaaaattcgatcccaaaaattaccgcactttatgggcaataaatcagctacggcgttatggggcgattgctttacttttgagctggctgcctgtagttggcgatttattttgtgccatagctggttggttaagattaaattttgtaacgagtagtctctttatctttctaggaaaaatggttcgttatgttgcgttattgtttttgagtacaccattcttattataa

SEQ ID NO: 1026 - protein, 157 aa, Haemophilus influenzae
MDIFSFFSADFWQTNSLCFMFISAFLSATVLPGNSEVIFVALAVPKLMLGSLFNADILALILIATAGNSLGSLTTYGIGRWMPKFDPKNYRTLWAINQLRRYGAIALLLSWLPVVGDLFCAIAGWLRLNFVTSSLFIFLGKMVRYVALLFLSTPFLL

SEQ ID NO: 1027 - DNA, 504 bp, Haemophilus influenzae
atgccattacttgatagttttaaagtggatcacacaaaaatgaacgcacctgcagtacgcattgcaaaaacgatgctcacgccaaaaggcgataatattactgtttttgatttacgtttttgtattccaaacaaagaaattctttccccaaaaggcattcatacacttgaacatttatttgctggatttatgcgcgatcacttaaatggcgatagcatagaaattattgatatttctccgatgggatgtcgcacgggattttatatgtctttgattggcacaccaaatgaacaggaagtgtctgaggcttggttagcttcaatgcaagatgttttaggtgtacaagatcaagcttctattcccgaattaaatatctatcaatgcggaagctatacggaacattccttagaagatgcacacgaaattgccaaaaatgttatcgcacgcggtataggtgtaaataaaaatgaagatttgtcactcgataattccttattaaaatag

SEQ ID NO: 1028 - protein, 167 aa, Haemophilus influenzae
MPLLDSFKVDHTKMNAPAVRIAKTMLTPKGDNITVFDLRFCIPNKEILSPKGIHTLEHLFAGFMRDHLNGDSIEIIDISPMGCRTGFYMSLIGTPNEQEVSEAWLASMQDVLGVQDQASIPELNIYQCGSYTEHSLEDAHEIAKNVIARGIGVNKNEDLSLDNSLLK

SEQ ID NO: 1029 - DNA, 180 bp, Haemophilus influenzae
atgggcaattttctgcagaagccgcatattttacattttggcattaccaattcaggcgttgttagtcaatggctgcaagcctttgaaaaacaaggtataaacggcttaatcctcaaacctaaaagtcgtccaatcatgaaaccgaaataccctaagatgccacctaaaccgaaaacatga

SEQ ID NO: 1030 - protein, 59 aa, Haemophilus influenzae
MGNFLQKPHILHFGITNSGVVSQWLQAFEKQGINGLILKPKSRPIMKPKYPKMPPKPKT

SEQ ID NO: 1031 - DNA, 708 bp, Haemophilus influenzae
atgaaaaacgtcatgaaattatctgtaatcgcacttttaactgcagctgcagttccagcgatggcaggcaaaacagaaccttatactcaatctggcactaatgctcgtgaaatgttacaagagcaagcaattcattggattagtgttgatcaaatcaaacaaagtttagaaggtaaagcaccaattaatgtaagctttgatattgatgataccgtgcttttcagtagcccttgcttttaccacggacaacaaaaattctcaccaggtaaacacgattatttgaaaaaccaagatttctggaatgaagtaaatgcaggttgcgataaatattctattcctaaacaaattgccatagatttaattaatatgcaccaagcacgtggcgaccaagtttactttttcactggccgtactactggcaaagtggatggtgtaacaccaattttagaaaaaacgttcaatattaagaatatgcacccagttgaatttatgggcagccgtgaacgtacaacaaaatataacaaaacgcctgcaatcatttcacataaagtgagtattcactatggcgacagcgatgatgatgtactagcagctaaagaagcaggtgttcgtggtattcgtttaatgcgtgccgcaaactctacttatcaaccaatgccaactttaggcggctatggcgaagaagtgttaatcaattcaagctattaa

SEQ ID NO: 1032 - protein, 235 aa, Haemophilus influenzae
MKNVMKLSVIALLTAAAVPAMAGKTEPYTQSGTNAREMLQEQAIHWISVDQIKQSLEGKAPINVSFDIDDTVLFSSPCFYHGQQKFSPGKHDYLKNQDFWNEVNAGCDKYSIPKQIAIDLINMHQARGDQVYFFTGRTTGKVDGVTPILEKTFNIKNMHPVEFMGSRERTTKYNKTPAIISHKVSIHYGDSDDDVLAAKEAGVRGIRLMRAANSTYQPMPTLGGYGEEVLINSSY

SEQ ID NO: 1033 - DNA, 528 bp, Haemophilus influenzae
atgacaacgattgtaagcgtacgtcgcaatgggcaagtcgtcgtaggcggtgatggacaagtttctttaggcaataccgtaatgaaaggtaatgctcgtaaagtacgccgtttatataatggcaaagtgcttgctggttttgcgggtggaacggcagatgcatttacactttttgaattatttgaacgtaaacttgaaatgcatcaagggcatttgctaaaaagtgcggtggaattagcgaaagattggcgtacagatcgcgcacttcgtaaattagaagcgatgctaattgttgcggatgaaaaagaaagtttaatcatcacgggtattggcgatgtggttcagcccgaagaagatcaaattttagcaatcggatcgggtggtaactatgcgttatctgcggcacgtgcgttagtggaaaatactgaactttctgcacatgaaattgttgaaaaatctttaagaattgctggtgatatttgcgtgttcacaaataccaatttcactattgaagaattaccgaattaa

SEQ ID NO: 1034 - protein, 175 aa, Haemophilus influenzae
MTTIVSVRRNGQVVVGGDGQVSLGNTVMKGNARKVRRLYNGKVLAGFAGGTADAFTLFELFERKLEMHQGHLLKSAVELAKDWRTDRALRKLEAMLIVADEKESLIITGIGDVVQPEEDQILAIGSGGNYALSAARALVENTELSAHEIVEKSLRIAGDICVFTNTNFTIEELPN

SEQ ID NO: 1035 - DNA, 1335 bp, Haemophilus influenzae
atgtctgaaatgactcctcgcgaaatagtttctgaattagatcaacatattattggtcaagccgatgcaaaacgtgctgtggcgattgcgttgcgtaaccgttggcgtcgtatgcagcttcaagaacctttgcgtcatgaagtaactccaaaaaatattttaatgattggcccaactggtgtgggtaaaactgaaattgcgcgccgtttagcaaaattagctaacgcaccatttatcaaagtggaagcaacgaaatttactgaagtaggttacgtggggaaagaggtggattccattattcgtgatttaacggatagtgcgatgaaacttgttcgccaacaagaaattgcgaagaacagagcaagagctgaagacgtggctgaagagcgtattttggatgctttacttcctccagcaaaaaatcagtggggcgaagttgaaaaccatgatagtcacagcagtactcgccaagcgttccgtaaaaaattacgtgaaggtcaattagatgataaagaaatcgaaattgatgtgtctgctggcgtatctatgggggttgaaattatggctcctccaggcatggaagaaatgacaaatcaactgcaatcattgttccaaaatttgggttcagacaaaacgaaaaaacgcaaaatgaaaattaaagatgcgttgaaaacgttgattgatgatgaagcagcgaaattaattaaccctgaagaacttaaacaaaaagccattgatgctgtggaacaaaatggtattgtctttatcgatgaaatcgacaaaatttgtaagaaaggtgaatacagtggtgctgatgtatcgcgtgaaggtgtgcaacgtgatttacttccgttagtagaaggttcgaccgttagcaccaaacacggaatggtaaaaactgatcacattttatttattgcatctggtgcattccaagttgctcgtccttcagatttaatccctgaactacaggggcgtttgccgattcgtgttgaacttaccgcattaagtgcggcggattttgagcgcattttaacagaacctcacgcctctttaaccgaacaatacaaagcgttgatggcaacagaaggcgtgaatattgaatttacaacagaggcggttaagaaaattgctgaggctgcattccgagtgaatgaaaaaacggaaaatatcggtgcacgtcgtttacatacggtaatggaacgtttgatggataaaatttctttcagcgcaagcgatatgaatggtcaaacggtcaatattgatgcggcttatgttgcggatgcacttggcgaagtggttgaaaatgaagatttgagccgttttattctttaa

SEQ ID NO: 1036 - protein, 444 aa, Haemophilus influenzae
MSEMTPREIVSELDQHIIGQADAKRAVAIALRNRWRRMQLQEPLRHEVTPKNILMIGPTGVGKTEIARRLAKLANAPFIKVEATKFTEVGYVGKEVDSIIRDLTDSAMKLVRQQEIAKNRARAEDVAEERILDALLPPAKNQWGEVENHDSHSSTRQAFRKKLREGQLDDKEIEIDVSAGVSMGVEIMAPPGMEEMTNQLQSLFQNLGSDKTKKRKMKIKDALKTLIDDEAAKLINPEELKQKAIDAVEQNGIVFIDEIDKICKKGEYSGADVSREGVQRDLLPLVEGSTVSTKHGMVKTDHILFIASGAFQVARPSDLIPELQGRLPIRVELTALSAADFERILTEPHASLTEQYKALMATEGVNIEFTTEAVKKIAEAAFRVNEKTENIGARRLHTVMERLMDKISFSASDMNGQTVNIDAAYVADALGEVVENEDLSRFIL

SEQ ID NO: 1037 - DNA, 1053 bp, Haemophilus influenzae
ttgaaaaaattctttgctcactcactcaaaaatcttttcctttccaccaccgcactttttgcggcttccgcttttgccaataacaaactttacgtctataactggacagactatgtgccttctgatttagtcgcacagttctctaaagaaactggcatcgaggtaatttattctacctttgaaagcaacgaagaaatgtatgcgaaacttaaacttactcagaatacgggttctggctatgatttggtgtttccatcaagttactacgtaaataaaatgattaaggaaaagatgcttcaaccgattgatcaaagtaaattgaccaatattcatcaaatccctaaacatttattaaataaagaattcgacccagaaaataaatattcattaccttacgtttacggcttaactggtattgaagttaatgcggatgagattgatcctaaaaccattaccagctgggcagatttatggaaacctgaatttaaaggcaaagttctcatgaccagtgatgcgcgtgaagtgttccacgtagcattattactggatggtaaatcgccaaataccaccaatgaagaagacatcaaaacagcttatgagcgtttagaaaaactgttaccaaatgtagcgacttttaactctgattctcctgaagtcccttacgtacaaggcgaagttgcaattggtatgatttggaatggttcagcttatttagcgcagaaagaaaatcaatctcttcaatttgtgtatccaaaagaaggtgcaattttctggatggataactatgcgattccgactacagcaaaaaatgttgaaggtgcacataagttcattgacttcttacttcgccctgaaaatgcaaaaattgttatcgaacgcatgggcttttctatgccaaataatggggcgaaaacattgctaagcgcggaagttgctaatgatccaaaattatttccaccagcggaagaagtagaaaaaggaattatgcaaggcgatgtaggagaagctgttgatatttatgaaaaatattggagtaaattaaaaactaattag

SEQ ID NO: 1038 - protein, 350 aa, Haemophilus influenzae
MKKFFAHSLKNLFLSTTALFAASAFANNKLYVYNWTDYVPSDLVAQFSKETGIEVIYSTFESNEEMYAKLKLTQNTGSGYDLVFPSSYYVNKMIKEKMLQPIDQSKLTNIHQIPKHLLNKEFDPENKYSLPYVYGLTGIEVNADEIDPKTITSWADLWKPEFKGKVLMTSDAREVFHVALLLDGKSPNTTNEEDIKTAYERLEKLLPNVATFNSDSPEVPYVQGEVAIGMIWNGSAYLAQKENQSLQFVYPKEGAIFWMDNYAIPTTAKNVEGAHKFIDFLLRPENAKIVIERMGFSMPNNGAKTLLSAEVANDPKLFPPAEEVEKGIMQGDVGEAVDIYEKYWSKLKTN

SEQ ID NO: 1039 - DNA, 1296 bp, Haemophilus influenzae
atgcttaattttgcctatcaagaacacgttcgctcttattatttcgactctcgtaaccaagattttcaattcccgccgctcactcaaattgaacatgctgatgtatgtgtgatcggggctggattttttggtttatctgcagcattagaactggcggagaaaggaaaaaaagtcattgtcttagagggagcaagagtaggatttggtgcttctggtcgcagtggtgggcaggcaattaatggctttgaagaaggcattgatgaatacgttaaacaagttggcgaagataaagcacataaactttggaatatgtcattagagaccattgatattattgatgaacgtattgaaaaatatggcattcaatgcgactggaaaaaaggctatgccacattagcattaaatgaacgccgaatggatgacttaattgaaatggaaaaagaaagtcataaaaattttggctatcagaatatgcaactttgggataaaactaaattaaaacagcacttaggcagcgatatttatgtgggggggctatttgatagtaattcagggcatttgcatccacttaattattgcttaggtttagcgaaagcttgtgtcgatctgggtgttcagatttttgaacaatctcctgtcgtggatatggttgagaaaaatggttgcgttgaggttaaaacagctaaaagtgcggttatttctcaagacgttattttagccaccaatgcttatattaatgtcctcccgaaatctattcatcacggcattaatcgtaaaatattacctgtggaaagttttattatcgccacagagccgttaagccaagcggttgctgattctgtcattaataatggcatgtcggtgtgtgataacaatttattattagactattatcgtttaagtgctgacaatcgcttgctttttggtagtgattcgagctcagaaaaagatatggtcgcgattatgcggaaaaatatgttgtgtgtattcccgcaacttgaaaatgtaaaaatcgattatggctgggctggcccgattgatatgaccttaaattcaacgccacattttggtcgtatttctccgcatatttattttgctcatggttattctggtcacggtgttgctttgactggtcttgcggggcgaattgtagcggaggcgattttgggtgacgatgaacgtttatctatttttgaaggactgaaagtcccttctgtttatggtggtcgaattatcaaagatcttgcgacaaagattggtgtgcagtattacaagtttttagataaataccgttaa

SEQ ID NO: 1040 - protein, 431 aa, Haemophilus influenzae
MLNFAYQEHVRSYYFDSRNQDFQFPPLTQIEHADVCVIGAGFFGLSAALELAEKGKKVIVLEGARVGFGASGRSGGQAINGFEEGIDEYVKQVGEDKAHKLWNMSLETIDIIDERIEKYGIQCDWKKGYATLALNERRMDDLIEMEKESHKNFGYQNMQLWDKTKLKQHLGSDIYVGGLFDSNSGHLHPLNYCLGLAKACVDLGVQIFEQSPVVDMVEKNGCVEVKTAKSAVISQDVILATNAYINVLPKSIHHGINRKILPVESFIIATEPLSQAVADSVINNGMSVCDNNLLLDYYRLSADNRLLFGSDSSSEKDMVAIMRKNMLCVFPQLENVKIDYGWAGPIDMTLNSTPHFGRISPHIYFAHGYSGHGVALTGLAGRIVAEAILGDDERLSIFEGLKVPSVYGGRIIKDLATKIGVQYYKFLDKYR

SEQ ID NO: 1041 - DNA, 1443 bp, Haemophilus influenzae
atgtcagaaaatttgttacttttcagcttgttagctgttgttattatattgattttattacttattctacgccagcaaaaatatacacatcttcatcaagaattatcgaaaacgactcaagattataatcagcttgccagtaaatttgatgaacttagtagcattaaaaaccagtttgaacaacaaacaattaaagtacagactgaaaatcaagggctgcaatatcgtttaactgaacgtgatgaacaaatacatcatctcacacaagaacgacaaaatttgactgaaaaattgaccgcactttctcaagaattaacggggttacaaacaaccttaacagagaaagaaaaatatttttccacacaacaacagaactttgaacaatctaagctgcagttgagtgtggaatttcaaaacctagccaatcggattttagatgaaaaaagtcgatcatttagtcaatcaaatcaaacggcattggaaaccttgctcaagcctttccgtgagcaaattgaaggtttccaaaaacgggtcaatgaaattcactccgaatccgtgaaaggcaatgcaggcttggaagcggaaattaaaaaagtgctggaaattggtctgaatatgtcgcaagaggcgagtaatttaacttctgcactgaaaggcgaaaagaaaacgttaggcaactggggcgaagtgcaattagaacgagcgttgcaactggcaggacttgaagaaaatgtacattaccgcgctcaagcgcattttaaagatgaacaaggcggacgaaattatcctgattttgtgttgaatttacctgatgaaaaacacttaattatcgacagcaaaatgtcgttagtggcttacgaaagtgcggtgaattctgaggatgattttgaacgagagcgtttactgaaagaacatatttctgcattgaaaagtcatattaatgatctgcataaaaaagattacagcaatctgattggcatgtgcagcccgaattttgttcttatgtttattgcggtggaacctgcgtatattgaggctttaaaagctgatcctgccttatttaattacggttatgaacgcaatgtaattatggtctctcacactacgctaatgccgattttacgcaccgtggcaaacctctggcgtatcgaacgtggtaatgctgaagccaaagaaattgctgaaaaagcgggcgaaatctataaccaaatttgcttggtggcagagcgtttaaacaaactcggcaatacgctttccactgtcagcaaccaatacaatagcaccgtcaccgcacttgttggccaacaaggattagttggcaaagtagaacgatttaaaaccctttccgcaaaagccaataaaacaatgcccgatgtggacttattgaataatcagctggatttggctagattgaatgtcttaaatcaagaaaatcttcaataa

SEQ ID NO: 1042 - protein, 480 aa, Haemophilus influenzae
MSENLLLFSLLAVVIILILLLILRQQKYTHLHQELSKTTQDYNQLASKFDELSSIKNQFEQQTIKVQTENQGLQYRLTERDEQIHHLTQERQNLTEKLTALSQELTGLQTTLTEKEKYFSTQQQNFEQSKLQLSVEFQNLANRILDEKSRSFSQSNQTALETLLKPFREQIEGFQKRVNEIHSESVKGNAGLEAEIKKVLEIGLNMSQEASNLTSALKGEKKTLGNWGEVQLERALQLAGLEENVHYRAQAHFKDEQGGRNYPDFVLNLPDEKHLIIDSKMSLVAYESAVNSEDDFERERLLKEHISALKSHINDLHKKDYSNLIGMCSPNFVLMFIAVEPAYIEALKADPALFNYGYERNVIMVSHTTLMPILRTVANLWRIERGNAEAKEIAEKAGEIYNQICLVAERLNKLGNTLSTVSNQYNSTVTALVGQQGLVGKVERFKTLSAKANKTMPDVDLLNNQLDLARLNVLNQENLQ

SEQ ID NO: 1043 - DNA, 312 bp, Haemophilus influenzae
  misc_feature 4, 5, 6, 7, 8: n is any nucleotide
atgnnnnntatcgatctcgcattaactgcgggtgtaccaagttttctacaaacgttgaatgtagtaacgaatgaaatgtatgttgaacgcgttgttattgcagaagaaattaaagaaaaaaatccagaaatattgaccgcacttttaacacaacttcaacaacttgaaagccatcagggtaatcaaatacaagtggaatttgtatcacacgaaacttttaaaaaattcaccctcgaaagtaaagctattgttcgtactggcgaatgttcaccttatgccaatgtgattttatattctggcgtgctattttaa

SEQ ID NO: 1044 - protein, 103 aa, Haemophilus influenzae
  VARIANT 2, 3: Xaa is any amino acid
MXXIDLALTAGVPSFLQTLNVVTNEMYVERVVIAEEIKEKNPEILTALLTQLQQLESHQGNQIQVEFVSHETFKKFTLESKAIVRTGECSPYANVILYSGVLF

SEQ ID NO: 1045 - DNA, 1482 bp, Haemophilus influenzae
atggaaactttactcaaaattagtggtgttgataagtcatttccaggtgtgaaagccttgaataatgcctgtttatctgtttacgctggacgcgtaatggcattgatgggggaaaatggggcgggtaaatcgactttgatgaaggtgcttactggtatttattctaaagacgcaggcacaattgagtatcttaatcgatcagttaatttcaatggacctaaagcctcacaggaagctggcattagtattattcaccaagaactgaatttggtcggtaatctcacgattgcagaaaacattttccttggtcgtgaatttaaaacctcgtggggagcgattaactggcagaaaatgcaccaagaagcagacaagctacttgcgcgtttgggggtaactcacagcagtaaacagctttgcgctgaactttctattggtgagcaacaaatggtggagatagccaaagccttaagttttgaatccaaagttatcattatggatgaaccaaccgatgcgctcacagatacggaaaccgaagccctattcaatgtgattcgtgaactcaaagcagaaaatcgtggcattgtttatatctctcatcgtttaaaagaaattttccaaatttgtgatgatgtgacggttttacgcgatggtcaatttatcggtgaacgcgttgtggcagagattacagaagatgatttaattgaaatgatggttggtcgtcgtcttgatgaacaatatccgcatttatcacaagaaaaaggcgaatgtgtattggatgtgaaacatgtgagcggaagtggcattgatgatgtttccttcaaattgcatgccggtgaaattgttggtatctcgggcttaatgggtgcgggtagaacggaactcggcaagctactttacggtgctttgccaaaaacggcgggaaaagtgcggttaaaaaatcaagagattgagaatctcagtccgcaagatggtttggataatggtattgtatatatttctgaagatcgtaaaggtgatggcttggttttaggaatgtcagtaaaagaaaatatgtcgctcacatcgctcgatcatttttcacaaaaaggcggtattcgtcatcaagcggaaaaaatggcagtagatgactttattctgatgtttaacattaaaacacctaatcgtgatcaacaagtaggtttgctatctggtggaaatcaacaaaaagtggcaattgctcgtggattaatgactcgcccaaatgtgttgattttagatgaaccaactcgtggcgtagatgttggcgcgaagaaagaaatttatcagttgattaacgaatttaagaaagagggcttgagtattttaatgatctcatctgatatgccagaagtgcttggtatgagtgaccgcattttggttatgcgagaaggcagaatcagtgcagaattttctcgcaaagaggcaactcaagaaaaattattagcagcagctattggtaaataa

SEQ ID NO: 1046 - protein, 493 aa, Haemophilus influenzae
METLLKISGVDKSFPGVKALNNACLSVYAGRVMALMGENGAGKSTLMKVLTGIYSKDAGTIEYLNRSVNFNGPKASQEAGISIIHQELNLVGNLTIAENIFLGREFKTSWGAINWQKMHQEADKLLARLGVTHSSKQLCAELSIGEQQMVEIAKALSFESKVIIMDEPTDALTDTETEALFNVIRELKAENRGIVYISHRLKEIFQICDDVTVLRDGQFIGERVVAEITEDDLIEMMVGRRLDEQYPHLSQEKGECVLDVKHVSGSGIDDVSFKLHAGEIVGISGLMGAGRTELGKLLYGALPKTAGKVRLKNQEIENLSPQDGLDNGIVYISEDRKGDGLVLGMSVKENMSLTSLDHFSQKGGIRHQAEKMAVDDFILMFNIKTPNRDQQVGLLSGGNQQKVAIARGLMTRPNVLILDEPTRGVDVGAKKEIYQLINEFKKEGLSILMISSDMPEVLGMSDRILVMREGRISAEFSRKEATQEKLLAAAIGK

SEQ ID NO: 1047 - DNA, 972 bp, Haemophilus influenzae
atgatgaaaaatgaaacatctaattttcaaataggaagatttttgattgaacagcgttcttttattgcgttgattattcttatcgcgattgtatcaatggttaatcctgatttttttagcgtagataatattttgaatattttacgccaaacttcggttaatgcgattattgcagtgggtatgactttcgttattttaattgctggtatagatctttctgttggatctgtattggcattgacaggtgcaatcgccgcttcaatggtgagtatcgaattgcctatttttttagtcattcctgtggttttattgattggaacacttcttggtggcataagtggtgtaattgtggcaaagggaaaagttcaggcttttattgctaccttggttaccatgaccttactgcgtggtataacaatggtttatacagatggtcgtcctattacgacaggtttttcggataatgctgatctatttgctagcattggtacaggctatgttttaggtatcccagtaccaatttggattatgagtatcgtgtttgcggttgcttggtatattttaaaacacacaccaatcggtcgctatatttatgctttaggtggaaatgaggcagcgacccaactttctggtattaacgtcaataaaatcaaagtatttgtttttgcggtgagtggatttctttctgcgctggcgggtttaattgtaacttcacgtttatcttctgctcaacccactgctggcgtatcttatgaattagatgcaattgccgcagtggtagtcggtggaaccagtttgatgggggggaaaggtcgtgtaatgggaacgctcatcggtgcattaatcatcggatttttaaacaatgcattaaatttattagatatttcatcttactatcaaatgatagcaaaagcgttggttattttggttgctgttttagccgataactatcttggtacaaaaaaactgtaa

SEQ ID NO: 1048 - protein, 323 aa, Haemophilus influenzae
MMKNETSNFQIGRFLIEQRSFIALIILIAIVSMVNPDFFSVDNILNILRQTSVNAIIAVGMTFVILIAGIDLSVGSVLALTGAIAASMVSIELPIFLVIPVVLLIGTLLGGISGVIVAKGKVQAFIATLVTMTLLRGITMVYTDGRPITTGFSDNADLFASIGTGYVLGIPVPIWIMSIVFAVAWYILKHTPIGRYIYALGGNEAATQLSGINVNKIKVFVFAVSGFLSALAGLIVTSRLSSAQPTAGVSYELDAIAAVVVGGTSLMGGKGRVMGTLIGALIIGFLNNALNLLDISSYYQMIAKALVILVAVLADNYLGTKKL

SEQ ID NO: 1049 - DNA, 879 bp, Haemophilus influenzae
atgaaaaaactaaccgcacttacttctgctgtattattaggtttggctgtttctggctctgcttctgcacaagacacaatcgctttggcagtatctacattagataacccattttttgtaacgttaaaagatggcgcacagaaaaaagcggatgaattaggttataagttagtcgtgcttgattcacaaaatgaccctgctaaagaattagctaatgtcgaagatttaactgtgcgtggtgcaaaaatattattgatcaatccaactgattctgaagcagttggcaacgcagtggcgattgcaaaccgtaagcatattccagtaattacattagatcgtggcgcagctaaaggaaacgtagtgagccatattgcatctgacaatatcgcaggtggtaaaatggcaggtgattttatcgcacagaaattaggcgataatgccaaggtgattcaacttgaaggtattgcaggaacatctgcggcacgcgaacgaggtgagggtttcaaacaagctattgatgctcataaattcaatgtgcttgccagtcagccagcagattttgatcgaacaaaaggtttgaatgtaacggaaaatttgttggcatctaaaggtgatgttcaagcaatttttgcgcaaaatgatgaaatggcattaggtgcattacgtgcggtgaaagccgcaaataaaaaagtccttatcgtaggttttgatggtaccgatgatggtgttaaagctgtaaaaagtggcaaaatggcggcaactatcgcacaacaacccgagcttattggttcattaggtgttgttaccgctgataaaatcttaaagggcgaaaaagttgaagcgaaaattccagtagatttgaaagtaataagtgaataa

SEQ ID NO: 1050 - protein, 292 aa, Haemophilus influenzae
MKKLTALTSAVLLGLAVSGSASAQDTIALAVSTLDNPFFVTLKDGAQKKADELGYKLVVLDSQNDPAKELANVEDLTVRGAKILLINPTDSEAVGNAVAIANRKHIPVITLDRGAAKGNVVSHIASDNIAGGKMAGDFIAQKLGDNAKVIQLEGIAGTSAARERGEGFKQAIDAHKFNVLASQPADFDRTKGLNVTENLLASKGDVQAIFAQNDEMALGALRAVKAANKKVLIVGFDGTDDGVKAVKSGKMAATIAQQPELIGSLGVVTADKILKGEKVEAKIPVDLKVISE

SEQ ID NO: 1051 - DNA, 921 bp, Haemophilus influenzae
atgagaaaaaccctcacaattctcggtagtatcaatgctgatcacgttatttctgtgccttactttgctaaacccggtgaaacgctaacaggtcaaaattatcaaattgcctatggtggcaaaggtgccaatcaagcagtggcagccgctcgtttaggggcaaaggtcgcgttcattagttgcattggatcagatagcataggcaaaacaatgaaaaatgcgtttgcacaagaaggaattgatacaacccatattaataccgtttcacaggaaatgacgggaatggcatttattcaagttgcccaatcgggcgagaacagtattgtgctggctagcggtgcaaattcacatttgaatgagatagttgttcgtcaaagtgaggcgcaaattgcacaatcggattgcttgttaatgcaattagaaaccccactttctggtgtggagctggctgctcaaatcgctaagaaaaatggtgtcaaggttgtgctaaatcctgctccagcgcagattttatcggacgaattattgagtttgattgatattattacaccaaatgaaactgaagctgaaatcctgacggggatagcggtaaccgacgagcaaagtgcggtgaaagctgcgagtgtttttcacgataaaggtattgaaaccgtgatgattacccttggcgcgaaaggcgtgtttgtcagtcgaaaaggtaaaagccgcatcattaagggcttttgtgtgcaagcaatagatactaccgcagctggtgatacatttaatggcggttttgttacggctttattggaagaaaaatcctttgatgaagccattcgttttgggcaagctgctgctgcgattagtgtgacgaaaaaaggggcgcaatcctctattccaacgcgtcaagaaactttgaaatttcttgaacacgcttaa

SEQ ID NO: 1052 - protein, 306 aa, Haemophilus influenzae
MRKTLTILGSINADHVISVPYFAKPGETLTGQNYQIAYGGKGANQAVAAARLGAKVAFISCIGSDSIGKTMKNAFAQEGIDTTHINTVSQEMTGMAFIQVAQSGENSIVLASGANSHLNEIVVRQSEAQIAQSDCLLMQLETPLSGVELAAQIAKKNGVKVVLNPAPAQILSDELLSLIDIITPNETEAEILTGIAVTDEQSAVKAASVFHDKGIETVMITLGAKGVFVSRKGKSRIIKGFCVQAIDTTAAGDTFNGGFVTALLEEKSFDEAIRFGQAAAAISVTKKGAQSSIPTRQETLKFLEHA

SEQ ID NO: 1053 - DNA, 999 bp, Haemophilus influenzae
atggcgacaatgaaagatattgcacgactggcgcaagtttcgacttccacagtttcacatgtcattaatggatcgcgttttgttagcgatgaaattcgtgagaaagtgatgcgtattgtcgctgaactgaattacaccccctcagctgttgcacgaagtcttaaggtgcgagaaaccaaaactatcgggctacttgtcaccgcaacaaataatccattctttgcagaagtgatggctggcgtggagcaatattgtcagcagcatcaatataatcttattattgctgccactggtggcgatgccaaacgcctacaacaaaatctgcaaactctaatgcacaaacaagtggatggtttgcttttgatgtgtggtgatagccgttttcaggctgatatagagttagccatttcgctgccactcgttgtgatggactggtggtttactgaattaaatgcagataaaatactcgaaaattcagcacttggtggctatttggcgacaaaagcattaatcgatgcaggacatcgtaaaattggcattattacgggaaatctcaaaaaatctgtcgcacaaaatcgtttgcaaggttataaaaatgcgctgttggaagcaaaaattgcgttaaatcctcattggattgtcgaaagtcattttgactttgaaggcggtgcccttggtatacaatctttacttactcaatcttcacgtccaacagcagttttttgttgtagtgacaccattgctgttggtgcataccaagctattcagcaacaaggcttacgtattccgcaagatctttcaattatgggctatgatgacattgaattggctcgttatctctcacctcccctttccaccatttgccaaccgaaagctgaacttggcaaacttgctgtagaagcactattgcaacgaattaaaaatcctaatgaaaattacctcactttggtgttagaaccgacttgtgtgttaagagagtctatttacagtttcaaataa

SEQ ID NO: 1054 - protein, 332 aa, Haemophilus influenzae
MATMKDIARLAQVSTSTVSHVINGSRFVSDEIREKVMRIVAELNYTPSAVARSLKVRETKTIGLLVTATNNPFFAEVMAGVEQYCQQHQYNLIIAATGGDAKRLQQNLQTLMHKQVDGLLLMCGDSRFQADIELAISLPLVVMDWWFTELNADKILENSALGGYLATKALIDAGHRKIGIITGNLKKSVAQNRLQGYKNALLEAKIALNPHWIVESHFDFEGGALGIQSLLTQSSRPTAVFCCSDTIAVGAYQAIQQQGLRIPQDLSIMGYDDIELARYLSPPLSTICQPKAELGKLAVEALLQRIKNPNENYLTLVLEPTCVLRESIYSFK

SEQ ID NO: 1055 - DNA, 552 bp, Haemophilus influenzae
atgaaagaaaacaaacctgttgatccttatgcgaaatataacgaacaatcgaatattatcgcgaaaataatttttgctagtcgctggttgcaagtgccgatttatttgggcttgattgtcacccttgcaatctactcttataaatttatcaaaggattatgggagttagtgattaatgtaaatgatatggattccaacacaattatgttaggcgtgttgaatttgattgatgtcgtgatgatcgctaacttgcttgtgatggtgactatcggtggctatgaaatttttgtatccaaattgcgtacacgtaatcaccctgatcaacctgaatggatgagccacgtaaatgcgactgtgctgaaagttaaactttctatgtctattatcggcatttcatctatccatatgttgcaaacttttgtgaatgcaagcaatatgccagaaaaaacgatgatgtggcaattattgttgcacttgggctttttagtgtcggcaattgctttagcttatacggacaaaattttgtatagcacaagccataaaacgcattaa

SEQ ID NO: 1056 - protein, 183 aa, Haemophilus influenzae
MKENKPVDPYAKYNEQSNIIAKIIFASRWLQVPIYLGLIVTLAIYSYKFIKGLWELVINVNDMDSNTIMLGVLNLIDVVMIANLLVMVTIGGYEIFVSKLRTRNHPDQPEWMSHVNATVLKVKLSMSIIGISSIHMLQTFVNASNMPEKTMMWQLLLHLGFLVSAIALAYTDKILYSTSHKTH

SEQ ID NO: 1057 - DNA, 489 bp, Haemophilus influenzae
atgtttattgatacttcagaactttgcgatctttatgcagaacaagtggatgtcgtggagccaattttttcaagctttggtggcgtaagtcatttttacggtaaagtcactacagtaaaatgctttgaaagtaatggattaattgctgaagtattagaagaaaacggcgaaggtcgagtgcttgtcattgatggcggtggtgcggtacgccgtggtttgattgatgcagaattggctcaacttgccgttgataatggttgggaaggcattattgtatatggtgcagtacgccaaattcagcaattagaaaacctcgatattggtattcatgcccttgcgccaattccagtcagtgcagatgaaagcagtgctggcgagagtgatattccagtgaattttggtggcgtaacctttttcccagaagattatatttacgcagatctgacaggaattatactttcgcaagagcctctagatttagaagattaa

SEQ ID NO: 1058 - protein, 162 aa, Haemophilus influenzae
MFIDTSELCDLYAEQVDVVEPIFSSFGGVSHFYGKVTTVKCFESNGLIAEVLEENGEGRVLVIDGGGAVRRGLIDAELAQLAVDNGWEGIIVYGAVRQIQQLENLDIGIHALAPIPVSADESSAGESDIPVNFGGVTFFPEDYIYADLTGIILSQEPLDLED

SEQ ID NO: 1059 - DNA, 891 bp, Haemophilus influenzae
atgtggtgggaaacggctcgaccgaaaactttgcccttagcgttggcatcgattttcacgggttcggcattaggttattgggcgaatccacaaggttttaatgggcttgtaatggtgctttgtttactcacgacaattttattgcaggtgctttctaattttgccaatgattatggggatcatcaaaaaggttcagatactgaagaacgtattgggccattacgtggcattcaaaaaggtgcaatttcagcaaaagaactgaaatggggattaattctaatagtgatggcaagttttctttcaggaagtttcttgattggaatcgcttatgaaaatctctcagatttattcgctttcgctgggcttggaattttagctattgttgctgccattacttacacagttggggtaaaaccttatggttatatgggcttgggcgatatttctgtgttggtattttttggtttgcttggtgttggcggtacttattatttgcaaactcacagtattgatagccacattattttgcctgctattggttctggcttattggcaagtgcggtattaaatatcaataatttacgcgatattgaacaggatgcgaaagctggcaaaaataccctagccgttcgtttaggtgcatataaagggcgtgtttatcattgtattttattaagtgtggcgaccctatgttatttagcatttgcggtggtaacggctatttcttggacaaattatttatttgtattagcaatgccgttgttagctaaacacgcgatctttgtttatcacagtcagcagccaagtgaattgcgtccaatgttggctcaaatgtctatgatttcgttattaatcaatatcttgtttagtttaggcttgcttatcggctaa

SEQ ID NO: 1060 - protein, 296 aa, Haemophilus influenzae
MWWETARPKTLPLALASIFTGSALGYWANPQGFNGLVMVLCLLTTILLQVLSNFANDYGDHQKGSDTEERIGPLRGIQKGAISAKELKWGLILIVMASFLSGSFLIGIAYENLSDLFAFAGLGILAIVAAITYTVGVKPYGYMGLGDISVLVFFGLLGVGGTYYLQTHSIDSHIILPAIGSGLLASAVLNINNLRDIEQDAKAGKNTLAVRLGAYKGRVYHCILLSVATLCYLAFAVVTAISWTNYLFVLAMPLLAKHAIFVYHSQQPSELRPMLAQMSMISLLINILFSLGLLIG

SEQ ID NO: 1061 - DNA, 720 bp, Haemophilus influenzae
atgaatgatttaaccttatcgcctatcgccattatccacacgccttataaagaaaaattctccgtaccacgccaacctaatttagttgaagacggagtaggcattgtagaactcttaccgccttataattcgcctgaagccgtgagaggattagaacaattcagtcatctttggttaatttttcagttcgaccaaatccaacaaggaaaatggcaacccaccgtacgccctccacggttaggcggtaatcaacgcgttggtgtatttgcttcacgtgcaacgcaccgcccaaatcctctcggtttatccaaagtcgaattacgtcaagtagaatgcatcaacagtaacatttttctccatttaggtgcggtggatttagtggatggcacgcccattttcgatatcaaaccctatattgcctatgcggatagtgagccaaatgcgcaatcgagctttgcccaagaaaaaccaccagtaaaactgactgttgaatttaccgagcaagtcaaaagtgcggtaaaaaaacgagaagaaaaacgaccgcacttaagtcgttttattcgccaagtgctagagcaagatcctcgcccagcctatcaacaaggtaaaccgagtgatcgtatttatggtatgagtttgtatgaatttaatgtgaaatggcgaattaaagcgggtacggtaaattgtgtagaagtgattgaaatagaaaaagacaaatag

SEQ ID NO: 1062 - protein, 239 aa, Haemophilus influenzae
MNDLTLSPIAIIHTPYKEKFSVPRQPNLVEDGVGIVELLPPYNSPEAVRGLEQFSHLWLIFQFDQIQQGKWQPTVRPPRLGGNQRVGVFASRATHRPNPLGLSKVELRQVECINSNIFLHLGAVDLVDGTPIFDIKPYIAYADSEPNAQSSFAQEKPPVKLTVEFTEQVKSAVKKREEKRPHLSRFIRQVLEQDPRPAYQQGKPSDRIYGMSLYEFNVKWRIKAGTVNCVEVIEIEKDK

SEQ ID NO: 1063 - DNA, 945 bp, Haemophilus influenzae
atgaatacaacaaagccttttcctcttccaacaggatatttcggtattcctcttggtttggcagccttatctttagcttggtttcatttagaaaacttatttcctgctgcgcgaatggtaagtgatgttcttggcattgtagcaagtgcggtctggattttatttattttaatgtgtgcgtataaacttcgttattactttgaggaagttcgtgcagagtatcatagcccagttcgtttttcctttattgcattgattcctattacaactatgttggtaggcgatattctttatcgttggaatcctttaattgctgaagttttaatttggattggaacgattggtcaattacttttctcaacattacgtgtcagtgaattatggcaaggtggtgtatttgagcaaaaatctactcatccttcgttttatttgcctgcggttgctgcaaatttcacaagtgcaagttcattagcattacttggctatcatgatttagcctacttattctttggcgcaggaatgattgcttggattatttttgaacctgtattattacaacatttacgtatttcatctcttgagccaccatttagagccacaatggggattgttttagcacctgcgtttgtgtgtgtatctgcttatttatcgatcaatcacggcgaggtggatacgttagctaaaatcctttggggatatggatttttgcaattatttttcttattgcgattattcccttggattgtggaaaaaggacttaacattggcttatggggattctcattcggattagcgtctatggcaaacagtgctaccgctttctatcatggcaatgttttacaaggtgtgtctatttttgcctttgttttctcaaatttaatgattggcttattagttctaatgacagttattaaattagctaaagggcaatttttcctaaaataa

SEQ ID NO: 1064 - protein, 314 aa, Haemophilus influenzae
MNTTKPFPLPTGYFGIPLGLAALSLAWFHLENLFPAARMVSDVLGIVASAVWILFILMCAYKLRYYFEEVRAEYHSPVRFSFIALIPITTMLVGDILYRWNPLIAEVLIWIGTIGQLLFSTLRVSELWQGGVFEQKSTHPSFYLPAVAANFTSASSLALLGYHDLAYLFFGAGMIAWIIFEPVLLQHLRISSLEPPFRATMGIVLAPAFVCVSAYLSINHGEVDTLAKILWGYGFLQLFFLLRLFPWIVEKGLNIGLWGFSFGLASMANSATAFYHGNVLQGVSIFAFVFSNLMIGLLVLMTVIKLAKGQFFLK

SEQ ID NO: 1065 - DNA, 4251 bp, Haemophilus influenzae
gtgaaagacttagttaagtttttaaaagcacaatcaaaaaccagtgaagattttgatgtgattaaaattgggttagcttccccagatatgatccgttcttggtcatttggtgaagtgaagaaacctgaaaccattaactaccgtacgttcaaacctgaacgtgatggtcttttctgtgcgcgtatcttcgggccagtaaaagattacgaatgtttatgtggtaaatataaacgtttaaaacaccgtggtgtgatttgtgaaaaatgtggtgttgaagtcactcaaactaaagttcgtcgtgaacgtatgggtcatattgaacttgcatcgccagttgcacatatttggttcttaaaatcattgccgtctcgtatcggtttacttttagatatgccattgcgcgatatcgaacgtgtactttattttgaaatgtacatcgtgaccgaaccaggtatgacggacttagagcgcggtcaattattaacagaagaacaataccttgacgctgaagatcgttggcaagatgaatttgaagcgaaaatgggcgccgaagcgattcaagatctcttaaaaggtatggatcttgaagctgaatgtgaaaaattacgtgaagaattacaagaaactaactctgaaactaaacgtaaaaaaatcactaaacgcttaaaattattagaagcatttgttcaatctggtaataaaccagaatggatggtgatgacggtattgccagttcttccaccagatttacgcccattagtgccacttgatggtggtcgttttgcgacttcagatctgaacgatttatatcgtcgtgtaatcaaccgtaacaatcgtttaaaacgtttattagatttaattgcgccagatattattgtgcgcaacgaaaaacgtatgttacaagaatctgttgatgccttattagataatggtcgtcgcggtcgtgcaattacgggttctaaccgccgtccattaaaatcattagcggatatgatcaaaggtaaacaaggtcgtttccgtcaaaatttattaggtaaacgtgttgattactctggtcgttctgtaatcactgttggcccatacttgcacttacaccaatgtggtttaccgaagaaaatggcattggaattattccgtccgtttatctatgcgaaattagaaagccgtggttatgctacgacaatcaaagcggctaagaaaatggttgagcgtgaagatgcgatcgtttgggatattcttgcagaagttattcgtgaacacccaattctattgaaccgtgcgccaacacttcaccgtttgggtatccaagcgtttgaaccgatcttaatcgaaggtaaagcgattcaattacacccacttgtttgtgcggcgttcaacgcagacttcgatggtgaccaaatggcggtacacgttccattaacccttgaagcacaattggaagctcgtgcgttgatgatgtccaccaataacgtgctttctccagcaaacggtgatccgattatcgttccatcacaagacgtggtattaggtctttactatatgacccgcgaaaaagtgaacggtaaaggcgaaagtatgttattgcaagatcctcgcgaagctgaaaaagcatatcgtacaggcgaagcggaattacattctcgcgtgaaagtgcgtattactgaatatgtgaaaaatgaagcgggcgaatttgatgcgaaaaccacgctgactgatacaactatcggtcgtgcaatcttatggatgatcgcgccgaaaggcatgccttattcattgttcaaccaaacattaggtaaaaaagccatttctaaactgattaacgaagcatatcgtcgtttaggtttaaaagaagcggtaatgtttgctgaccaaattatgtataccggttttgcgtatgcggcacgttctggttcatcagttggtattgatgatatggaaattccagcgaagaaatacgaaattatttctgcagcggaagaagaagtagctgagatccaagaacaattccaatcaggtcttgtgacggcaggcgaacgctataataaagtaatcgatatttgggctgccgcgaatgagcgcgtagcgaaagcgatgatggaaaacttatctcaagaagaagtcatcaatcgtgaaggtaatcctgaaaaacaagcgtcctttaacagtatctttatgatggctgattctggtgcgcgtggttctgcagctcagattcgtcagttagcaggtatgcgtggtttgatggctcgtccagatggctcgatcattgaaaccccaattacagcaaacttccgtgaaggtttgaacgtattacagtactttatttcaacccacggtgctcgtaaaggtttggcggataccgcattaaaaacagcgaactcaggttacttaactcgtcgtttagttgatgtggcacaagacttagtgattgtagaagatgactgtggtacgcacgaaggcttagtcatgaccccattaatcgaagggggagatgaaaaagttccacttcgtgaattagtgttaggtcgtgttgctgcagaagatattttaaaaccgggtacagaagaagtattaattccacgtaacactttattagatgaaaaactctgtgatgtgttggatgcaaactctgtagatagcgtaaaagtacgttctgttgtaacttgtgatactgattttggtgtatgtgcgaaatgttatggacgtgatcttgcgcgtggtcatttaatcaaccaaggcgaagcggtgggcgttattgccgctcaatctatcggtgagccgggtacacagctaacaatgcgtacgttccatattggtggtgcggcatctgcggcagcgaaagaatctagtgtgcaagttaaaaacactggtacagtgcatttaatgaatgcaaaattcgttactaacgatgaaggtaaattagtattaacgtctcgtaatactgaattaactattaccgatgcatttggtcgtactaaagaacattataaagtgccttacggtgcggtattaagcaaaggtgacggtcaagaagtcactgcaggcgaaactatcgcaaattgggatccacatacaatgccagttgtctctgaagtatctggttttgtgaaatttgtagacattattgatggtttaactgtgacgcgtcaaacagatgaattaacaggtttatcatcaatcgtggttcaagatgtgggtgaacgtgcaactgcgggtaaagatttacgtccaactattaaattggttgatgcaaatggcaacgatattttcttacctgaaactgatgttcttgcacagtacttcttaccgggtaaagcaattgtaagtttagacgatggcgcagcagtgaaagtaggggaaccattagcacgtattccgcaagaatctgtgggtactaaagatattactggtggtctaccacgtgttgcggatttatttgaagcacgtaaaccaaaagaacccgctatcttagctgaaatttctggtatcgtgtctttcggtaaagaaaccaaaggtaaacgccgtttattaattactcctgcagaaggcgaaacttacgaagaaatgattccaaaatggcgtcagctcaacgtatttgaaggcgaaatggtacaacgtggcgacgtaatttctgatggtgctgaaacaccacacgacattttacgtttacgtggcgtgcgtgcagtaactgaatacatcgtgaacgaagtgcaagatgtttaccgcttacaaggggtaaaaatcaacgataaacatatcgaagtaattgttcgccaaatgttacgtaaagcggtaattactaaagcttacgactcagaattccttgagggagaacaagtcgaagtggctcgcgtgaaaattgttaatcgccaacgtgaagcagaaggtaaaccaccagttgaatttgaacgtgaattattgggtatcaccaaagcgtctcttgcgactgaatcctttatctccgcagcatcgttccaagaaaccacgcgtgttcttaccgaagcggcagtggcaggtaaacgtgatgaattacgtggcttgaaagagaacgtaatcgtaggtcgtttaatcccagcaggtacaggttttgcgtatcatcaaaatcgtcacaaacatcgtttagttgatgatgtcgtagcgaaattatctgaagaagatgaagccgctatcgctgatgagtttgtcatgactgcagatgatgctagtgcgaacttagctgaaatgcttaacatggcagatgatgcggaataa

SEQ ID NO: 1066 - protein, 1416 aa, Haemophilus influenzae
MKDLVKFLKAQSKTSEDFDVIKIGLASPDMIRSWSFGEVKKPETINYRTFKPERDGLFCARIFGPVKDYECLCGKYKRLKHRGVICEKCGVEVTQTKVRRERMGHIELASPVAHIWFLKSLPSRIGLLLDMPLRDIERVLYFEMYIVTEPGMTDLERGQLLTEEQYLDAEDRWQDEFEAKMGAEAIQDLLKGMDLEAECEKLREELQETNSETKRKKITKRLKLLEAFVQSGNKPEWMVMTVLPVLPPDLRPLVPLDGGRFATSDLNDLYRRVINRNNRLKRLLDLIAPDIIVRNEKRMLQESVDALLDNGRRGRAITGSNRRPLKSLADMIKGKQGRFRQNLLGKRVDYSGRSVITVGPYLHLHQCGLPKKMALELFRPFIYAKLESRGYATTIKAAKKMVEREDAIVWDILAEVIREHPILLNRAPTLHRLGIQAFEPILIEGKAIQLHPLVCAAFNADFDGDQMAVHVPLTLEAQLEARALMMSTNNVLSPANGDPIIVPSQDVVLGLYYMTREKVNGKGESMLLQDPREAEKAYRTGEAELHSRVKVRITEYVKNEAGEFDAKTTLTDTTIGRAILWMIAPKGMPYSLFNQTLGKKAISKLINEAYRRLGLKEAVMFADQIMYTGFAYAARSGSSVGIDDMEIPAKKYEIISAAEEEVAEIQEQFQSGLVTAGERYNKVIDIWAAANERVAKAMMENLSQEEVINREGNPEKQASFNSIFMMADSGARGSAAQIRQLAGMRGLMARPDGSIIETPITANFREGLNVLQYFISTHGARKGLADTALKTANSGYLTRRLVDVAQDLVIVEDDCGTHEGLVMTPLIEGGDEKVPLRELVLGRVAAEDILKPGTEEVLIPRNTLLDEKLCDVLDANSVDSVKVRSVVTCDTDFGVCAKCYGRDLARGHLINQGEAVGVIAAQSIGEPGTQLTMRTFHIGGAASAAAKESSVQVKNTGTVHLMNAKFVTNDEGKLVLTSRNTELTITDAFGRTKEHYKVPYGAVLSKGDGQEVTAGETIANWDPHTMPVVSEVSGFVKFVDIIDGLTVTRQTDELTGLSSIVVQDVGERATAGKDLRPTIKLVDANGNDIFLPETDVLAQYFLPGKAIVSLDDGAAVKVGEPLARIPQESVGTKDITGGLPRVADLFEARKPKEPAILAEISGIVSFGKETKGKRRLLITPAEGETYEEMIPKWRQLNVFEGEMVQRGDVISDGAETPHDILRLRGVRAVTEYIVNEVQDVYRLQGVKINDKHIEVIVRQMLRKAVITKAYDSEFLEGEQVEVARVKIVNRQREAEGKPPVEFERELLGITKASLATESFISAASFQETTRVLTEAAVAGKRDELRGLKENVIVGRLIPAGTGFAYHQNRHKHRLVDDVVAKLSEEDEAAIADEFVMTADDASANLAEMLNMADDAE

SEQ ID NO: 1067 - DNA, 4032 bp, Haemophilus influenzae
atgggttactcctattctgaaaaaaaacgaattcgtaaagatttcggtaaacgtccgcaagttttaaatgttccttatttattaaccattcagttggattcttttgataaatttattcaaaaagatcctgaaggtcagcaaggtttagaagcggcatttcgttctgtatttcctattgtaagcaataatggctatacagaattacaatatgtagattatcgtttagaagagccagagtttgatgtacgtgagtgccaaattcgtggttcaacttatgcagcaggcttacgtgtaaaattacgtttagtgagctacgataaagaatcttcttcacgcgcagttaaagatattaaagaaaatgaagtttatatgggggaaatcccattaatgacagataacggtacttttgtaattaatggtaccgagcgtgttatcgtttcacaattacaccgtagtccaggtgtattcttcgattctgacaaaggtaaaacccattcttcaggtaaagtgctttataacgcacgcattattccttaccgtggttcttggttagattttgaattcgatccaaaagataacttatttgcgcgcattgaccgtcgccgtaaattaccggcaacaatcattcttcgtgcattaggctacaccactgaagaaatcttaaacttattctttgataaaattacctttgaaatcgctggcgataaattgttaatgactttagtgccagaacgtttacgtggtgaaacggcttcttttgatattgaagcaaatggcaaagtgtatgttgaacgtggtcgtcgcatcactgctcgtcacattaaagcattagaaaaagataatatctcacaagtggttgtaccttctgaatatattttaggtaaagttgcgtcgaaagattatgttgatttagagtctggcgaaattatttgtcctgcaaatggcgaaatttcgttagaaaccctcgcaaaattagcacaagctggttacaccacgatcgaaactttatttactaatgatttagattatggtccatatatttctgaaacgctacgtgtcgatccaacttatgacaaaactagtgcgctttacgaaatttatcgtatgatgcgcccgggcgagccaccaacaccagaatcttcagaagcgttattcaataatttattcttctctgcagaacgttatgatttatctacagtaggtcgtatgaagttcaaccgttctttagcttttccagaaggggaaggtgcgggtattttaagcaatgaagatattattgcggtaatgcgtaaattgatcgacatccgtaatggtcgtggcgaagtagacgatattgaccatttgggtaaccgtcgtatacgtagcgtgggcgaaatggctgaaaaccaattccgtatcggtttagtgcgtgttgaaagagcggtcaaagaacgtctatctttaggcgatttagatgcgatcacgccacaagacttaattaatccaaaaccaatttctgcagcagtaaaagaattctttggttcttcacagctttcgcaatttatggatcaaaacaacccattgtcagaagtgacacacaaacgtcgtatttctgcattaggtccaggcggtttaacgcgtgagcgtgcaggctttgaagtgcgtgacgtacataatactcactatggtcgtttatgtccgattgaaacccctgaaggtccaaacattggtttgatcaactcactttctgcttttgcacgtactaatgattatggtttcttagaaacaccatatcgtaaagtggttgatggtcaagttactgaagaaattgaatacttatctgtaattgatgaagcaaactacatcattgcacaggcaaactcaaacttagacgaaaataaccgttttactgatgctttcgttactgctcgtggtgaacgtggtgaatctggtttatataaacctgaagatattcactatatggatgtttcgacacaacaggtggtatctgttgcggctgcattaattccattccttgagcatgacgatgcgaaccgtgcgttgatgggggcgaacatgcagcgtcaagcagttccaacattacgtgcggataaaccattagttggtacaggtatggaaaaaccaatcgcacttgactcaggtgttgcggttgttgcaaaacgtggtggtaccgttcagtacgttgatgcgtctcgtattgtgattaaagtaaatgaagatgagactattgcaggtgaagctggtattgatatttataatttaattaaatacacccgctctaaccaaaatacttgtattaaccaaattccttgtgtgaatttaggcgatccaattaatcgtggcgaagtattagcagatggtccttcaactgatttaggggaacttgcattaggtcaaaatattcgcgtagcgttcatgccttggaacggctataacttcgaagactcaatgttagtttctgaacgtgttgttcaacaagaccgtttcactaccatccatattcaagaattatcttgtgttgcgcgtgatactaagttaggtgcagaagaaattactgcggatattccaaacgtaggtgaatcagcgttaagcaaacttgatgaatctggtatcgtttatgttggtgctgaggttaaaggtggcgacatcttagtcggtaaagtaacccctaaaggagaaactcaattaaccccagaagaaaaattgttacgtgcaatctttggggaaaaagcttccgatgtgaaagattcttcattacgcgtgccaaatggtacatcaggtacggttattgatgttcaagtcttcactcgtgacggcgtagaaaaagataaacgtgcattagaaatcgaagaaatgcaacttcgtgaggcgaaaaaagatttaactgaagagttagagattttagaagctggtttatttgctcgtgtgcgtaatcttcttatttctagtggtgcggatgcggcgcaattagataaagtagagcgtactaaatggttagaacaaaccattgcagatgaagaaaaacaaaaccaattagaacagcttgctgagcaatacgaagaacttcgtaaagagtttgaacataaacttgaagtgaaacgtaagaaaatcattaaaggcgatgatcttgcaccgggcgtattaaaagttgtgaaagtttaccttgcagtgaaacgtcaaatccagccgggggataaaatggcgggtcgtcacggtaacaaaggtgttatctcgaaaattaacccagttgaagatatgccatacgatgaaaatggtcagccagttgaaatcgtattaaacccactgggcgtaccgtctcgtatgaacatcggtcagatccttgaaactcacttaggtttagcggcaaaaggtattggtgatcaaatcaatgcaatgcttaaacaaaaacaagaagtggaaaaattacgtagctatgtccaaaaagcatacgatttattaggtaatggttcacaaaaagtggatttaagcacttttactgatgaagaagtattgcgtttagcgggaaatttacgtaaaggcttaccagttgcaacgccagtgttcgatggtgcagacgaagcggaaatcaaagaactattaaaacttggtggattaccaacttcaggtcaaataaccctttacgatggtcgtactggcgagaaatttgaacgtccagtaaccgtgggttatatgtatatgctcaaattgaaccacttagttgatgataaaatgcacgctcgttcaacaggttcttatagccttgttacacaacagccattgggtggtaaagcacaatttggtggtcagcgtttcggtgagatggaggtatgggcacttgaagcatatggtgcagcctacaccttacaagaaatgctaactgtgaaatccgatgatgtgaatggtcgtacgaagatgtataaaaatatcgtaagtggcaaccaacatatggagccaggcacaccggaatctttcaacgtaattatgaaagaaatccgctcacttggtttaaatatcgagttagacgaagagtaa

SEQ ID NO: 1068 - protein, 1343 aa, Haemophilus influenzae
MGYSYSEKKRIRKDFGKRPQVLNVPYLLTIQLDSFDKFIQKDPEGQQGLEAAFRSVFPIVSNNGYTELQYVDYRLEEPEFDVRECQIRGSTYAAGLRVKLRLVSYDKESSSRAVKDIKENEVYMGEIPLMTDNGTFVINGTERVIVSQLHRSPGVFFDSDKGKTHSSGKVLYNARIIPYRGSWLDFEFDPKDNLFARIDRRRKLPATIILRALGYTTEEILNLFFDKITFEIAGDKLLMTLVPERLRGETASFDIEANGKVYVERGRRITARHIKALEKDNISQVVVPSEYILGKVASKDYVDLESGEIICPANGEISLETLAKLAQAGYTTIETLFTNDLDYGPYISETLRVDPTYDKTSALYEIYRMMRPGEPPTPESSEALFNNLFFSAERYDLSTVGRMKFNRSLAFPEGEGAGILSNEDIIAVMRKLIDIRNGRGEVDDIDHLGNRRIRSVGEMAENQFRIGLVRVERAVKERLSLGDLDAITPQDLINPKPISAAVKEFFGSSQLSQFMDQNNPLSEVTHKRRISALGPGGLTRERAGFEVRDVHNTHYGRLCPIETPEGPNIGLINSLSAFARTNDYGFLETPYRKVVDGQVTEEIEYLSVIDEANYIIAQANSNLDENNRFTDAFVTARGERGESGLYKPEDIHYMDVSTQQVVSVAAALIPFLEHDDANRALMGANMQRQAVPTLRADKPLVGTGMEKPIALDSGVAVVAKRGGTVQYVDASRIVIKVNEDETIAGEAGIDIYNLIKYTRSNQNTCINQIPCVNLGDPINRGEVLADGPSTDLGELALGQNIRVAFMPWNGYNFEDSMLVSERVVQQDRFTTIHIQELSCVARDTKLGAEEITADIPNVGESALSKLDESGIVYVGAEVKGGDILVGKVTPKGETQLTPEEKLLRAIFGEKASDVKDSSLRVPNGTSGTVIDVQVFTRDGVEKDKRALEIEEMQLREAKKDLTEELEILEAGLFARVRNLLISSGADAAQLDKVERTKWLEQTIADEEKQNQLEQLAEQYEELRKEFEHKLEVKRKKIIKGDDLAPGVLKVVKVYLAVKRQIQPGDKMAGRHGNKGVISKINPVEDMPYDENGQPVEIVLNPLGVPSRMNIGQILETHLGLAAKGIGDQINAMLKQKQEVEKLRSYVQKAYDLLGNGSQKVDLSTFTDEEVLRLAGNLRKGLPVATPVFDGADEAEIKELLKLGGLPTSGQITLYDGRTGEKFERPVTVGYMYMLKLNHLVDDKMHARSTGSYSLVTQQPLGGKAQFGGQRFGEMEVWALEAYGAAYTLQEMLTVKSDDVNGRTKMYKNIVSGNQHMEPGTPESFNVIMKEIRSLGLNIELDEE

SEQ ID NO: 1069 - DNA, 690 bp, Haemophilus influenzae
atggctaaattgactaaaaaaatgaaagcaatcaaagctggcgtagattctactaaagcatacgaaattaacgaagcgatcgcggtattaaaacaattcgcaacagctaaattcgtagaaagtgttgatgttgcagtaaacttaggtatcgatcctcgtaaatctgaccaaaacgttcgtggtgcaacagtattaccacacggtactggtcgtgaagtacgtgtagctgtgttcactcaaggtgctaacgcagatgcagctaaagaagctggtgctgatttagtgggtatggaagatttagcagagcaaatcaaaaaaggcgaaatgaactttgatgttgttatcgcttctcctgatgcaatgcgtgttgttggtcaattaggtcaagtattaggcccacgtggtttaatgccaaaccctaaagttggtactgtaacaccaaacgttgctgaagcagttaaaaatgctaaatctggtcagatccgttatcgtaatgataaaaacggtattatccacaccactatcggtaaagcaaacttctctgaagttcaattaaaagaaaatcttcaagcattattggctgctttaaataaagcaaaaccaactactgctaaaggtattttcatcaagaaagtaagcatctctaccactatgggtgcaggtgttgctgttgatcaagcttctttataa

SEQ ID NO: 1070 - protein, 229 aa, Haemophilus influenzae
MAKLTKKMKAIKAGVDSTKAYEINEAIAVLKQFATAKFVESVDVAVNLGIDPRKSDQNVRGATVLPHGTGREVRVAVFTQGANADAAKEAGADLVGMEDLAEQIKKGEMNFDVVIASPDAMRVVGQLGQVLGPRGLMPNPKVGTVTPNVAEAVKNAKSGQIRYRNDKNGIIHTTIGKANFSEVQLKENLQALLAALNKAKPTTAKGIFIKKVSISTTMGAGVAVDQASL

SEQ ID NO: 1071 - DNA, 429 bp, Haemophilus influenzae
atggcaaaaaaagtccaagcctatgttaagttgcaagttgcagctggtatggctaacccatcaccaccagttggtcctgcattaggtcagcaaggtgtgaacattatggaattctgtaaagcattcaacgctcgtactgagagcttagaaaaaggtttaccaattccagttgttatcactgtatatgcagaccgttcatttactttcgtcactaaaactccaccagcagcagtattattgaaaaaagctgcaggtatcaaatctggttctggtaaaccgaacaaagataaagtgggtaaagtaactttagatcaagttcgtcaaatcgctgaaactaaagcagcagatatgactggtgcgactatcgaaaccaaaatgaaatcaatcgctggtactgctcgttcaatgggcttagtggtggaggaataa

SEQ ID NO: 1072 - protein, 142 aa, Haemophilus influenzae
MAKKVQAYVKLQVAAGMANPSPPVGPALGQQGVNIMEFCKAFNARTESLEKGLPIPVVITVYADRSFTFVTKTPPAAVLLKKAAGIKSGSGKPNKDKVGKVTLDQVRQIAETKAADMTGATIETKMKSIAGTARSMGLVVEE

SEQ ID NO: 1073 - DNA, 705 bp, Haemophilus influenzae
atgactccacatattaacgcgcctgaaggtgcatttgctgatgttgttttaatgcctggcgatccacttcgtgcaaaatacattgcagaaacttttttacaagatgttgttgaagtgacgaatgttcgtaatatgcttggttttactggaacttataaaggtcgtaaaatttctattatgggacacggaatggggattccatcttgctctatttacgcgaaagaattaatcactgaatatggcgtgaaaaaaattatccgtgtaggttcttgtggcactgttcgtatggacgtgaaagtgcgcgatgtgattatcggtttaggtgcatgtactgattcaaaagtaaaccgtattcgtttcaaagataacgactttgcagctattgctgacttcgatatggcacaagctgcaaaagcaaaaggcaaagccgttcgtgtaggtaatttattctcggcggatttattctatacacccgatgtagaaatgttcgacgtgatggaaaaatacggcattttaggcgtggaaatggaagctgctggtatttatggggtggctgcagaatatggtgcgaaagcattaacgatttgtaccgtgtctgatcatattcgtactcacgaacaaaccacggcagaagaacgtcaattaacattcaatgatatgattgaaattgcgttagattcagtattaattggtgatgcacagtaa

SEQ ID NO: 1074 - protein, 234 aa, Haemophilus influenzae
MTPHINAPEGAFADVVLMPGDPLRAKYIAETFLQDVVEVTNVRNMLGFTGTYKGRKISIMGHGMGIPSCSIYAKELITEYGVKKIIRVGSCGTVRMDVKVRDVIIGLGACTDSKVNRIRFKDNDFAAIADFDMAQAAKAKGKAVRVGNLFSADLFYTPDVEMFDVMEKYGILGVEMEAAGIYGVAAEYGAKALTICTVSDHIRTHEQTTAEERQLTFNDMIEIALDSVLIGDAQ

SEQ ID NO: 1075 - DNA, 129 bp, Haemophilus influenzae
atggcaccaagccgtcgtagtgatgttgctcgtttaggtatcaaagccgttatcgctggtactctcgctaatttaatgagtgcaactattgcgggtttatttatcggcttaggtgctgcagcactttaa

SEQ ID NO: 1076 - protein, 42 aa, Haemophilus influenzae
MAPSRRSDVARLGIKAVIAGTLANLMSATIAGLFIGLGAAAL

SEQ ID NO: 1077 - DNA, 1074 bp, Haemophilus influenzae
atgagtgtgttaagcagcattttgggaatggtcgtattaatcgctattgccgtgttactttctaataatcgtaaagcgattagtattcgaaccgtagtaggggcgttagcaatccaagtaggatttgccgcccttattttatatgtgccagcaggtaaacaagcgttgggtgccgctgcggatatggtatccaatgttattgcctatggtaatgacgggattaatttcgttttcggcggattagcggatccaagtaaaccatccggtttcatttttgcagtgaaagtattaccgattatcgtgttcttctctggcttaatttctgtgctttactatctcggcattatgcaagtcgtgattaaagtattaggtggcgcattacaaaaagcattgggtacgtcaaaagcggaatcaatgtcagcggcggcgaatatcttcgtcggtcaaactgaagcaccattggttgttcgcccttacattaaaaatatgacccaatctgaattatttgccattatggtgggtggtacagcgtctatcgcgggttcagtaatggcaggttatgctggaatgggcgtgccattgacatacttaatcgctgcgtcatttatggcggcaccagcaggtttattatttgcgaaattaatgttcccacaaaccgaacaattcacagataaacaaccagaagacaatgattcagaaaaaccaactaacgtacttgaagcaatggcgggcggtgcgagtgcaggtatgcaacttgcgttaaacgtaggtgcaatgttaatcgcatttgttggtttaattgcattaattaacggtattttaagtggcgtaggcggatggtttggctatggcgacttaaccttacaatctatctttggtttaattttcaaaccattagcatacttaatcggtgtaacagatggtgctgaagcaggtattgcaggacaaatgatcgggatgaaattagcggttaatgaatttgtgggttatcttgaatttgcaaaatatttacaaccagattctgcaattgtattaactgaaaaaaattactttcgcgctttgtggttttgctaa

SEQ ID NO: 1078 - protein, 357 aa, Haemophilus influenzae
MSVLSSILGMVVLIAIAVLLSNNRKAISIRTVVGALAIQVGFAALILYVPAGKQALGAAADMVSNVIAYGNDGINFVFGGLADPSKPSGFIFAVKVLPIIVFFSGLISVLYYLGIMQVVIKVLGGALQKALGTSKAESMSAAANIFVGQTEAPLVVRPYIKNMTQSELFAIMVGGTASIAGSVMAGYAGMGVPLTYLIAASFMAAPAGLLFAKLMFPQTEQFTDKQPEDNDSEKPTNVLEAMAGGASAGMQLALNVGAMLIAFVGLIALINGILSGVGGWFGYGDLTLQSIFGLIFKPLAYLIGVTDGAEAGIAGQMIGMKLAVNEFVGYLEFAKYLQPDSAIVLTEKNYFRALWFC

SEQ ID NO: 1079 - DNA, 789 bp, Haemophilus influenzae
atgaccgctctttctgagatttttgtgccgttacatcggattattccgttttcaaatgtagaggggcaaggcaatcgttcaagcatttttctgcaaggttgcaagttaaattgcttgtattgccataatcctgaaactattcctcgttatacggaaaatgcgaaattggtcagtttgcagtatttgtatgaacaggttatggaggcagttccatttattcgcggtgtaacggtttctggtggagaacccactattcatcacaaaaaacttgtgccactctttaaggctttacgttcgcaaggattgacttgctatttggatagtagtggcttttttgagtttgatcgtattcgttcgttaattgatgtcactgacaaatttttatttgatctcaaaggcgagggcattggcttgcaaacactttgttttgatcggaaaaatcaagctggcattgtaccacagcaagtgataccaaaacgtttacatataaaaaacgataaactggagcggaatttgcaaaatttagctgccttgttgccattaaataaagtggaagaagtgcggttggtttttttaaagcatttttttgatgcggaacatttggtgggcaaagttgctcaactactacgaaattatccagacgtggcattaaaaattatctgcgtgcatagcaaaggcgtacgtgatgaagctgggttatcagcgtatatccccagtgtggaagaaactaatgcgctatctgcttatgcacgtcaatgtggaattaacaagattttgactattttatag

SEQ ID NO: 1080 - protein, 262 aa, Haemophilus influenzae
MTALSEIFVPLHRIIPFSNVEGQGNRSSIFLQGCKLNCLYCHNPETIPRYTENAKLVSLQYLYEQVMEAVPFIRGVTVSGGEPTIHHKKLVPLFKALRSQGLTCYLDSSGFFEFDRIRSLIDVTDKFLFDLKGEGIGLQTLCFDRKNQAGIVPQQVIPKRLHIKNDKLERNLQNLAALLPLNKVEEVRLVFLKHFFDAEHLVGKVAQLLRNYPDVALKIICVHSKGVRDEAGLSAYIPSVEETNALSAYARQCGINKILTIL

SEQ ID NO: 1081 - DNA, 1545 bp, Haemophilus influenzae
atgttagcttcacttcaagatattctcgatacggttaaagccaataatctgacttatcatcaaaaattaatgacattaggcaatattgccgagcgtttatttgatcctcgcgatttgcttggttataccgatgaagaatggggctttttacagaatcaaatgatttgtgatttatgtgaaggttacgcaatttatcgtcctcgttatatcctgcctgattacaatgtgtatatccaaaagggctgcgaatttttagagttgccgcctccaaaagatcttgatgaggcacttgatggattattgattctttactcccacgtgccatccattacgacttatcctgtttatgttgggcgtcttgatgtgttgctcgaaccgttcattactgatgaagaaaaagattacataaaaattaaacgtttcttaaatcatattgataaaactgtgccagattcattctgtcatgccaatattgggccgtatgatacgaaagcaggtcgcttgattttacgcgccgtgattgagcttgaagcaccaacaccgaatatgactattcgttatgacaaatcgaaaacaagccgtgagtttgctgaacttgcagcaaaagcctgtttgttggtttctaaaccatcttttgcaaacgatgcttactatatttccgatctaggcgaagaatacggcgtagcaagttgctataacgcactgcctgaatgtggcggtgcctacaccttaacgcgtttacgtctagggacaattgctcgcgcctgtaaaagtgcggatgaaatgctgaatgaattattaccgcgtgtggcgaaatgtgctctttcaaccatggataaacgccacaaatttgtagtggaagaaagtaatttctttaacagttcattcctcgaaaaagagggatttatcaaacgcactaattttacaggaatgtttgcgattgtgggcttggctgatgccacaaatcatttattgcaatgtgaaggcttaaatgaaacctttggtaagagcgttcgtggcgatgaaattgcgacagcgattatggataaattgaaagaaatcactgatgcacacgaaggggtttatgtagaacgcactggcaatcgttatttattacacgcacaagtgggcgcaagtaaccacgaagaagacaagcgtaacgcaccggcacaccgtattcgtgtaggcgaagaaccaacgttacttgcacatttgaaacaatctgcaccgttccataaatatttcccatctggtacaggggatttatttgcttttgatcaaacctatgtagatcactgtgatgcagtggtggatattattgatggtgcattttccttaggctatcgctacattaccacctatttgaaaaacacggatttaattcgtgttacaggttatctagtgaagaaaagtgaagttgaaaaataccgtaaaggcgaagtcgcattacgcgatacaacttggtatggctcgggtacggatgaatgtgccaatgtgtttgatcgccaattacgcgatgaaaaagatgtgatcgctgaaaaataa

SEQ ID NO: 1082 - protein, 514 aa, Haemophilus influenzae
MLASLQDILDTVKANNLTYHQKLMTLGNIAERLFDPRDLLGYTDEEWGFLQNQMICDLCEGYAIYRPRYILPDYNVYIQKGCEFLELPPPKDLDEALDGLLILYSHVPSITTYPVYVGRLDVLLEPFITDEEKDYIKIKRFLNHIDKTVPDSFCHANIGPYDTKAGRLILRAVIELEAPTPNMTIRYDKSKTSREFAELAAKACLLVSKPSFANDAYYISDLGEEYGVASCYNALPECGGAYTLTRLRLGTIARACKSADEMLNELLPRVAKCALSTMDKRHKFVVEESNFFNSSFLEKEGFIKRTNFTGMFAIVGLADATNHLLQCEGLNETFGKSVRGDEIATAIMDKLKEITDAHEGVYVERTGNRYLLHAQVGASNHEEDKRNAPAHRIRVGEEPTLLAHLKQSAPFHKYFPSGTGDLFAFDQTYVDHCDAVVDIIDGAFSLGYRYITTYLKNTDLIRVTGYLVKKSEVEKYRKGEVALRDTTWYGSGTDECANVFDRQLRDEKDVIAEK

SEQ ID NO: 1083 - DNA, 996 bp, Haemophilus influenzae
atgcaagcatggcctgcttttgcaatgttgaaagcctcaaatccagagctaaaattaaccgcacttgtgccgagttacactgcgcctttagcggaaatttgtccatttattgatgatgttattattgatagcaaaaaaaatgacaaaacggatttcaaacgtcttgtgcaggaaatcaaagcgcagcagtttgatggcatgattagtttcttttccaatacccataatggaaaactcgcttggaaaagtggaattaaatatcgccttgcacctgcgactaaatgggttcaaattctctataatcaccgtctaacacaacgccgttctcgttctgaaaaatcagaagcggaatacaatcaagatttagttcgggcttttttgcaaaagcataatatgccagttgttgaacctaaaccgccttatttaatctttgagaaaagtgcggtggaaaatcagcacgtttttttacaagagagtttagggctttccgcaaataaaaaatggatctttgtgcatagtggttctggtggttcagctacgaatctttctttagcgcaatatgcggatttaattaaaggcttattggctgagtttgattgcaatattgtgctgacagcagggcctggcgaaagtgaaaaagcctatgaattagcaaatcttgtgaatgattcacacgtagtcatttacgataagaataaaggtttagtggattttgctcattctttggcttgtgcggatttatttattgcgggatctactgggccattgcatttgagcagtgcgtttaatattccgactatcgggttttatccaaatagtcgttcttctcagccgagacgctggaaacccattaatgatgtcgataagcatcttgcattttgcccacccgcaggaaaagagactcaaatgaatttagagttaatttcgatagacaatgcgttagctgaaatatcacttttcatacggaatatgtggcaaacgagcaataatatttaa

SEQ ID NO: 1084 - protein, 331 aa, Haemophilus influenzae
MQAWPAFAMLKASNPELKLTALVPSYTAPLAEICPFIDDVIIDSKKNDKTDFKRLVQEIKAQQFDGMISFFSNTHNGKLAWKSGIKYRLAPATKWVQILYNHRLTQRRSRSEKSEAEYNQDLVRAFLQKHNMPVVEPKPPYLIFEKSAVENQHVFLQESLGLSANKKWIFVHSGSGGSATNLSLAQYADLIKGLLAEFDCNIVLTAGPGESEKAYELANLVNDSHVVIYDKNKGLVDFAHSLACADLFIAGSTGPLHLSSAFNIPTIGFYPNSRSSQPRRWKPINDVDKHLAFCPPAGKETQMNLELISIDNALAEISLFIRNMWQTSNNI

SEQ ID NO: 1085 - DNA, 657 bp, Haemophilus influenzae
atgaagaaaaaagtacgcgttatacctcgcacatcttgggctgccacatcattatggacagcgcaatataaaaccatttcaatcttactttttgctctttctattttaggtattggagatgggcttattgtattatcaggtttaggatcgacaccttggactgtactttcacaaggtatagcaatacagacaaattttgatattggctggtcatcttttttaattagttgcgcagtaatgttggtatggaaacctctcaaattacgccttgggcttgggacattattaaatattatcgttattgctctatttctagggatcacaacaaaaatactggcaccgccaaccgcacttttttcacgaatgatcttctgtctgatcggtatattactctatggttttggaactgcgttatatctcacttgtcacttaggtgcgggccctcgagacggattaatggttggtatttgccaacgttttcatttaagcatcaacgtggtacgctcaagccttgaaatctcggtttgtttacttggttttttacttggtggtgtcgttggcttgggcactgtccttttcgccaccagcataggcagcgttgttcaattcttcttaaatattattgctcgtttgccacatattccgtatgaaaagtga

SEQ ID NO: 1086 - protein, 218 aa, Haemophilus influenzae
MKKKVRVIPRTSWAATSLWTAQYKTISILLFALSILGIGDGLIVLSGLGSTPWTVLSQGIAIQTNFDIGWSSFLISCAVMLVWKPLKLRLGLGTLLNIIVIALFLGITTKILAPPTALFSRMIFCLIGILLYGFGTALYLTCHLGAGPRDGLMVGICQRFHLSINVVRSSLEISVCLLGFLLGGVVGLGTVLFATSIGSVVQFFLNIIARLPHIPYEK

SEQ ID NO: 1087 - DNA, 1080 bp, Haemophilus influenzae
atggctaaattattagatatcgtgaaacccggtgttgtaacaggcgaagatgtgcaaaaagtttttgcttatgctaaagagcataactttgctattcctgccgtaaactgtgtgggttctgactccgttaatgccgtgttagaaactgctgcacgcgtaaaagcaccagtgattatccaattttcaaatggtggcgcagcgttctacgcaggtaaaggtatcaaaccaacgagtggtactcgtccagatgttttaggggcgattgctggagcgaaacaggttcatactttagcgaaagaatacggtgtgcctgttattcttcatactgatcacgcagcgaaaaaattattaccttggatcgacggtttattagatgcaggcgaaaaacattttgccgaaacgggtcgtccacttttctcttcacatatgatcgatttatctgaagagtcaatggaagaaaatatggcaatttgccgtgaatatcttgctcgtatggataaaatggggatgacccttgaaatcgaaatcggtattactggtggcgaagaagacggcgttgataactctgatgtagatgaatcacgtttatatacacaaccttctgatgtgctttatgtttacgatcaattgcatccagtaagccctaactttaccgttgctgctgcattcggtaacgtacatggtgtttacaaaccaggtaatgtaaaattaaaaccatctattttaggtgcatcacaagagttcgtttctaaagaacgtaatcttcctgcaaaaccaattaatttcgtattccacggtggttcaggttctagccgcgaagaaatccgcgaagcaattggctacggtgcaatcaaaatgaacattgatactgatacgcaatgggcgtcttggaatggtattttgaacttctacaaagcaaatgaagcatatcttcaaggtcaattaggtaaccctgaaggcccagacgcgccaaataaaaaatactacgatccacgtgtttggttacgtaaaatggaagaatctatgtctaaacgcttagagcaatctttcgaagacttaaattgtgttgatgttttataa

SEQ ID NO: 1088 - protein, 359 aa, Haemophilus influenzae
MAKLLDIVKPGVVTGEDVQKVFAYAKEHNFAIPAVNCVGSDSVNAVLETAARVKAPVIIQFSNGGAAFYAGKGIKPTSGTRPDVLGAIAGAKQVHTLAKEYGVPVILHTDHAAKKLLPWIDGLLDAGEKHFAETGRPLFSSHMIDLSEESMEENMAICREYLARMDKMGMTLEIEIGITGGEEDGVDNSDVDESRLYTQPSDVLYVYDQLHPVSPNFTVAAAFGNVHGVYKPGNVKLKPSILGASQEFVSKERNLPAKPINFVFHGGSGSSREEIREAIGYGAIKMNIDTDTQWASWNGILNFYKANEAYLQGQLGNPEGPDAPNKKYYDPRVWLRKMEESMSKRLEQSFEDLNCVDVL

SEQ ID NO: 1089 - DNA, 1161 bp, Haemophilus influenzae
atgtcagtaatcaaaatgaccgatttagatttagccggtaaacgtgtatttatccgtgcagatcttaatgtgccagtaaaagatggcaaagtgacctcagatgcgcgtattcgtgcgaccattcctactttaaaattagccttagaaaaaggcgcgaaagtgatggtaacttctcacttaggtcgtccaactgaaggagaattcaaaccagaagattctttacaaccagttgttgattacttaaaaaacgcaggctttaatgtgcgtttagaacaagattatttaaatggtgtggatgttaaagatggcgaaatcgttgttttagaaaacgtacgcataaacaaaggcgaaaagaaaaatgatccagaattaggtaaaaaatatgccgcactttgcgatgtatttgtaatggatgcttttggtacagctcaccgtgcgcaagcttcaacttatggcgttgcagaatttgcgccaatcgcttgtgcaggcccattattagcggctgagttagatgcattaggtaaagcattaaaagaacctgctcgtccaatggtcgcgatcgtaggcggttctaaagtttcaactaaattagaagtattaaattctctttcaaaaatcgctgaccaaattattgtgggcggtggcattgcgaatactttcattgcggcagctggtcacaatgtgggtaaatctttatatgaagctgatttaattccagttgcgaaagaattagccgcaaatacagatattccagttccagttgatgtgcgtgtaggtttagagttctctgaaacggcagcagcaacagaaaaagcggtaaatgaagtgaaagatgatgaatctatttttgatattggcgataaatcagcagaacaattggctgaaattatcaaaaatgcaaaaaccgttttatggaatggcccagttggcgtgtttgagttccctcacttccgtaaagggactgaaatcatttctcacgccattgcaaacagcgatgcattctctattgctggtggcggcgataccttagcggctatcgatttatttggtattgctgataagatttcttacatttcaacgggtggtggtgcgttcttagaatttgtagaaggcaaagtattacctgcagtagaaattcttgaaaaacgtgcgaaaaactaa

SEQ ID NO: 1090 - protein, 386 aa, Haemophilus influenzae
MSVIKMTDLDLAGKRVFIRADLNVPVKDGKVTSDARIRATIPTLKLALEKGAKVMVTSHLGRPTEGEFKPEDSLQPVVDYLKNAGFNVRLEQDYLNGVDVKDGEIVVLENVRINKGEKKNDPELGKKYAALCDVFVMDAFGTAHRAQASTYGVAEFAPIACAGPLLAAELDALGKALKEPARPMVAIVGGSKVSTKLEVLNSLSKIADQIIVGGGIANTFIAAAGHNVGKSLYEADLIPVAKELAANTDIPVPVDVRVGLEFSETAAATEKAVNEVKDDESIFDIGDKSAEQLAEIIKNAKTVLWNGPVGVFEFPHFRKGTEIISHAIANSDAFSIAGGGDTLAAIDLFGIADKISYISTGGGAFLEFVEGKVLPAVEILEKRAKN

SEQ ID NO: 1091 - DNA, 807 bp, Haemophilus influenzae
atgaaaaaacttacttccattctttctcttattgttctcgttatattagcaatttggcaatattttaccgatacaaccaaaactaaacatcaatcatcttcgcccgtaattgagcagacgaagcaaacaaaagtatctgagcctaaatttgagcctaaatttgaacctaaattcgagcctcaatttgagacaaagcgaacggatattgaaaaaagtgcggtaaaaaatccagatgtttttgcaaactatgatgtgattatgcgcaatgatcatattgggcaaaacgcaaaggcaccggtcgattattatatgttggcattatcttggtcgcctggattttgtgatattcagcgtgaaaaatatggcgatcagttgccttattcctctcaatatcaatgtggaaataaccgcacttttggttgggttgtacatgggctatggccacaaaatgcaaatgctcgcactgtttcagatcatcctcgtttttgcaaaggcgatttacccgccttgccaaaaggtttattagcacaatatttggcgatttctccgggcgagaaattattgcaaggcgaatgggaaaaacacggtagttgcgcctttgattctgcccagcaatattttgctaaggagcaggaattatttaacgcattaaaattaccgaatcaaaaattaagtagagatgaactttttggttggatgaagcaacataatccacaattaaaaaatgcgtatttgagggctagtcgaaatgaattatttatttgttatgataaaaaatggcaggtaatgaattgccaaagcaaataa

SEQ ID NO: 1092 - protein, 268 aa, Haemophilus influenzae
MKKLTSILSLIVLVILAIWQYFTDTTKTKHQSSSPVIEQTKQTKVSEPKFEPKFEPKFEPQFETKRTDIEKSAVKNPDVFANYDVIMRNDHIGQNAKAPVDYYMLALSWSPGFCDIQREKYGDQLPYSSQYQCGNNRTFGWVVHGLWPQNANARTVSDHPRFCKGDLPALPKGLLAQYLAISPGEKLLQGEWEKHGSCAFDSAQQYFAKEQELFNALKLPNQKLSRDELFGWMKQHNPQLKNAYLRASRNELFICYDKKWQVMNCQSK

SEQ ID NO: 1093 - DNA, 261 bp, Haemophilus influenzae
atggcattactcatcactagcaaatgtaccaactgcgatatgtgcttgcctgaatgcccaaacgaagccatttccattggcgatgagatttatgtgatcgatcctatactttgtacggaatgtgtcggccattacgacacgccaacctgccaaaaagtttgcccaatcactaactgtattaagcccgatcctgaacatcaagaaaccgaagaacagctttgggaacgctttgtgatgattcatcattcggataaattgtaa

SEQ ID NO: 1094 - protein, 86 aa, Haemophilus influenzae
MALLITSKCTNCDMCLPECPNEAISIGDEIYVIDPILCTECVGHYDTPTCQKVCPITNCIKPDPEHQETEEQLWERFVMIHHSDKL

SEQ ID NO: 1095 - DNA, 1158 bp, Haemophilus influenzae
atgcttgctatgccgcttacatcagcgggtatgggctttggttataccctgttattgctcgttggcttgtgggctttgttggtttacagtgggttgttgtttgtagaagtgtatcaaacagcggatcagttggatgatggtgtcgccacgctcgctgaaaaatattttggggttcctgggcgaattttagcaacgttgagtttgttagttttactttatgcactttcagccgcttatattactggtggtggatctttactttcaggcttgccaacggcttttggaatggaagcgatgtcgcttaaaacggcgattattatctttacggtggtattaggttcttttgtcgttgtaggaacgaaaggcgtggatggcttaactcgcgtgttatttattggtaagttaatcgcctttgcttttgtgctgtttatgatgcttccaaaagtagcaacagataatttaatggcattgcctttggattatgcttttgtggtttctgcggcaccaatattttttacttctttcggtttccacgttattatggcgagtgtgaatagctacttaggtggaagtgttgataaatttcgtcgtgccattttgattggtactgcgattccattagctgcttaccttgtatggcagttagcaactcatggtgtattaagtcaaagtgaatttgtgcgtattttacaagctgacccaacgctaaatggcttagtgaatgcaacgcgtgaaattacaggttctcattttatgggagaggttgtgcgtgtgttttcatcacttgcactgatcacttctttcttaggcgtaatgcttggtgtatttgaaggattaggggatttattcaagcgttatcatttgccaaataatcgctttgttttaactgtagccgcatttttaccgccacttgtatttgcattgttttatcctgaaggatttattacagcattaagttacgctggtttgttgtgtgcgttctattgcttaattttaccaattagcttggcatggcgtacacgtattgaaaatccaacattgccatatcgtgtttctggcggtaatttcgctttggtgtttgcgttattaattggcgtcgtgattatgctcattccatttttaattcaatggggatatttaccagtggtggcggggtaa

SEQ ID NO: 1096 - protein, 385 aa, Haemophilus influenzae
MLAMPLTSAGMGFGYTLLLLVGLWALLVYSGLLFVEVYQTADQLDDGVATLAEKYFGVPGRILATLSLLVLLYALSAAYITGGGSLLSGLPTAFGMEAMSLKTAIIIFTVVLGSFVVVGTKGVDGLTRVLFIGKLIAFAFVLFMMLPKVATDNLMALPLDYAFVVSAAPIFFTSFGFHVIMASVNSYLGGSVDKFRRAILIGTAIPLAAYLVWQLATHGVLSQSEFVRILQADPTLNGLVNATREITGSHFMGEVVRVFSSLALITSFLGVMLGVFEGLGDLFKRYHLPNNRFVLTVAAFLPPLVFALFYPEGFITALSYAGLLCAFYCLILPISLAWRTRIENPTLPYRVSGGNFALVFALLIGVVIMLIPFLIQWGYLPVVAG

SEQ ID NO: 1097 - DNA, 582 bp, Haemophilus influenzae
atggcgaaactctacttctattactccacaatgaacgctggaaaatcaacgacgttgctacaatcttcctataactatcgtgagcgtgatatgaacacattagtttatacggctgcgattgatgatcgttttggtgtggggaaagtcacatcgcgtattggcatttcgcaagatgcctttttatttcgctcggaaaccaatttgtttgatgaaatcaatgagcacttaaaaaaagaaaaagtgcattgcgtgttggtggatgaagctcaatttcttagcaaacaacaagtttaccagttgagtgatgttgttgataaactcaagatccctgtgctttgttatggcttgcgtacagatttccaagcggaactttttgaaggaagtaaatatttactcgcttgggcggatcaactcgaagaattaaaaacaatttgttattgtggccgcaaggctaattttgttttgcgtttaaatgatcagggcgaggtcattaaagaaggcgcgcaaattcaaattggcggcaatgattcttatctttctgtttgccgtttacactataaagaaaagtgcggtcaaatttaa

SEQ ID NO: 1098 - protein, 193 aa, Haemophilus influenzae
MAKLYFYYSTMNAGKSTTLLQSSYNYRERDMNTLVYTAAIDDRFGVGKVTSRIGISQDAFLFRSETNLFDEINEHLKKEKVHCVLVDEAQFLSKQQVYQLSDVVDKLKIPVLCYGLRTDFQAELFEGSKYLLAWADQLEELKTICYCGRKANFVLRLNDQGEVIKEGAQIQIGGNDSYLSVCRLHYKEKCGQI

SEQ ID NO: 1099 - DNA, 1029 bp, Haemophilus influenzae
atgaaaatcttaggcattgaaacttcctgtgatgaaacgggtgtggcgatttatgatgaagaaaaagggttaattgctaatcaactttatactcaaattgccctgcatgcagattatggtggtgtggttcctgaattagcatcacgcgatcatattcgtaaaacagcgcctcttattaaagcggcattagaggaagccaatttaaccgcgagcgatattgatggtattgcttatacgagtggccctgggcttgttggcgcattgcttgtcggtgctacgattgcacgttctttagcctatgcttggaatgttcctgcgattggtgttcatcatatggaagggcatttacttgcgccaatgcttgatgaaaattcaccgcactttccttttgttgctctgttggtatcgggtggccacactcaattagtgcgtgtcgatggtgtaggaaaatatgaagtgataggagaatctattgatgatgctgctggcgaagcctttgataaaacagcaaaattacttggattagattatccgggcggcgcggcactttctcgtttagcggaaaaaggtacgccaaatcgtttcacatttccacgtccaatgacagatcgtgcaggccttgattttagtttttctggtttaaaaacatttgccgcaaatacagttaatcaagcaattaaaaacgagggcgaactgatagagcaaactaaagcagatattgcttatgctttccaagatgcggtggtggatactcttgccattaaatgtaagcgtgcattgaaagaaacaggctataaacgtttagtgattgcgggaggggtgagtgcaaataaaaaactccgagaaacgcttgcgcacttaatgcaaaatttaggtggcgaagtgttttatcctcaacctcaattttgtacagataatggtgcaatgattgcttacacaggttttttacgtttaaaacaaggtcagcatagcgatctggctattgatgttaaacctcgttgggcaatggcggaattaccggcaatttag

SEQ ID NO: 1100 - protein, 342 aa, Haemophilus influenzae
MKILGIETSCDETGVAIYDEEKGLIANQLYTQIALHADYGGVVPELASRDHIRKTAPLIKAALEEANLTASDIDGIAYTSGPGLVGALLVGATIARSLAYAWNVPAIGVHHMEGHLLAPMLDENSPHFPFVALLVSGGHTQLVRVDGVGKYEVIGESIDDAAGEAFDKTAKLLGLDYPGGAALSRLAEKGTPNRFTFPRPMTDRAGLDFSFSGLKTFAANTVNQAIKNEGELIEQTKADIAYAFQDAVVDTLAIKCKRALKETGYKRLVIAGGVSANKKLRETLAHLMQNLGGEVFYPQPQFCTDNGAMIAYTGFLRLKQGQHSDLAIDVKPRWAMAELPAI

SEQ ID NO: 1101 - DNA, 216 bp, Haemophilus influenzae
atgcctgtaattaaagtacgtgaaaacgaatcatttgacgtagctttacgtcgtttcaaacgctcttgcgaaaaagcgggaatcttagctgaaatacgcgctcgcgaattttacgaaaaaccaactacaattcgtaaacgtgaaaatgcaacacttgcaaaacgtcacgcaaaacgcaacgctcgcgaaaacgcgcgcaatacccgtttatactaa

SEQ ID NO: 1102 - protein, 71 aa, Haemophilus influenzae
MPVIKVRENESFDVALRRFKRSCEKAGILAEIRAREFYEKPTTIRKRENATLAKRHAKRNARENARNTRLY

SEQ ID NO: 1103 - DNA, 1782 bp, Haemophilus influenzae
atgaaaggttctattccacgcccctttattgatgatttgctgacaaagtccgatattgtcgatgtgattaacacgcgcgtaaaactaaaaaaagctggccgcgattatcaagcctgctgccctttccatcacgaaaaaacaccatccttcacagttagccaaaagaaacagttttatcattgctttggttgtggcgcacatggtaatgcgatttcctttttaatggactatgacaaacttgaatttgtcgaagccattgaagaacttgcagctatggcagggcttgaaataccttacgaaaaacgtgctaatcacagcggaaaacctcaagctaattaccaaaccaaacgaaatctctatgaattaatgcaagagattgccacgttttatcaaaaccaattgccattaaattctcaagcacaagaatatttacaacaacgtgggctttcacctgaaattattgagcgtttccaaattgggtttgtgccgaatgcaatggatactgtactgcgtaaatttggtgttaatcgtgaagaacaacaaaaactcattgaattaggcatgctttctcgaaatgatcgtggcaatatttacgataaattccgaaatcgcatcatgtttccgattcgtgataaacgtggtcgcacagtggcttttggtgggcgtgtattaacagatgaaaaaccgaaatatctgaattcgccagaaaccattacttatcataaaggtaaggagctttatggtttgtatgaagccttgcaaaccaacgatgaacccaaacaattacttgttgttgaaggttatatggatgtagtggcattagcacaatttggcgtggattatgcggtcgcttctttaggtacgtccacgacatcagaacaaattcaacttatttttcgttcgaccgaacaggttgtttgttgttacgatggtgaccgtgcagggcgtgatgctgcttggcgcgcactagaaaatgcgttgccctatttagaagatggcagacaactcaaatttattttcttgccagatggagaagatcctgatacttacattcgtcaatacggcaaagaaaaatttgaagaatacatcgaaagtgcgcaatctttaagcgagtttatgtttgcacatttaagtcctcaggttgatttttccactaaagaagggcgcggaaaattagttgcgctagctgcgccgttaattcaccaaattccaggagaaatgcttcgcttatcgctacgcaatatgcttgctcaaaaacttgggatttttgatcaaactcagctggaaaatcttattcccaaacaattagaacaagccaatacacaacaaaaagtcactcataataagatcaagaagacaccaatgcgaatggtcatttcattgcttctgcaaaatcctgagttagtaaaacgtatgtctgaaagtggcgtgcaagcattacgtgcggaagcagggtttgaaattctggaaaaattgaccgcactttgtcgccaacgagagggcattactacagggcaaattttggaatacttccgcaatacatcttacagtaatccccttgaaatactggcgacttgggatcatttattagacgaatccgacataatcaacgcattttctcaaaattaccgtcgcttaaatattcaagctattgagcgcgatattgaaatgcttattgctaaagaacgaacagagggtctcactaatgaagaaaaaacggtacttgtacatcttttagctggtaaagaacagcagaaaaaacagttagtgaatccgctataa

SEQ ID NO: 1104 - protein, 593 aa, Haemophilus influenzae
MKGSIPRPFIDDLLTKSDIVDVINTRVKLKKAGRDYQACCPFHHEKTPSFTVSQKKQFYHCFGCGAHGNAISFLMDYDKLEFVEAIEELAAMAGLEIPYEKRANHSGKPQANYQTKRNLYELMQEIATFYQNQLPLNSQAQEYLQQRGLSPEIIERFQIGFVPNAMDTVLRKFGVNREEQQKLIELGMLSRNDRGNIYDKFRNRIMFPIRDKRGRTVAFGGRVLTDEKPKYLNSPETITYHKGKELYGLYEALQTNDEPKQLLVVEGYMDVVALAQFGVDYAVASLGTSTTSEQIQLIFRSTEQVVCCYDGDRAGRDAAWRALENALPYLEDGRQLKFIFLPDGEDPDTYIRQYGKEKFEEYIESAQSLSEFMFAHLSPQVDFSTKEGRGKLVALAAPLIHQIPGEMLRLSLRNMLAQKLGIFDQTQLENLIPKQLEQANTQQKVTHNKIKKTPMRMVISLLLQNPELVKRMSESGVQALRAEAGFEILEKLTALCRQREGITTGQILEYFRNTSYSNPLEILATWDHLLDESDIINAFSQNYRRLNIQAIERDIEMLIAKERTEGLTNEEKTVLVHLLAGKEQQKKQLVNPL

SEQ ID NO: 1105 - DNA, 1890 bp, Haemophilus influenzae
atggaaaaaaatcaacaatctacggctgaacaatattcagaacaaattgagcaattgatggagctaggtcgtacacaagggtatttaacttttgctgaaatcaatgacttattgcccgaagatgctattgatcctgaatattacgacaaattgctacaaacgttgcaaaatgatgcaggtatccctgtattagatgaagcaccagaaagcgatgatatgatgttgagtgataccatccctgatgaagatgcagtggaagaagcaactcaaattctttcaaatgtagaatctgaaataggtcgaacaacggatcccgtacgcatgtatatgcgcgaaatgggaacggtggatcttcttactcgtgaagatgaaattagcattgcaaaacgtattgaaggagggatcgatgaagttcaaacctctatcgcagcctatcctgaagcattaaatggattactaaaaaattatgatgatgtagaaaaaggtaatttccgtttgaccgatttaattacgggttttgttgatccaaatgccgaaatagaagaacacagcggacttgatgaagacttttctgacgaagatgatgaagaagaatctagtaatgcagatgtggaagacaatgaagatgaagaagacaatgaatcagaatctacatcagattcaagcgactctgataacagtattgatcctgaagttgctcgcgaaaaatttcagcaattaagagaacagcactctaaaacccttgctgttattgaaaaacacggccgctctggaaaacgtgcccaagatcaaattgcactacttggcgaaatttttaaacaattccgtttagtaccaaaacaatttgatttactcgttctatcaatgaaagaaatgatgaaacgtgtgcgctaccaagaacgtcagctacaaaaaatattagtggatatagcaggaatgccaaaggatgattttgaaaaaattattaccactaatggcagtaacagtgaatgggtagcaaaagcattaaaatctagcaaaccttgggctaaacgtttaattaaatatgaagatcgtatttatgaagccttaaacaatctagcgataacagaagaaaatactaaacttaccattactcaaatgcgtgacatttgcgatgcagtcgcacgaggcgaacaaaaagcacgtcgagctaaaaaagaaatggttgaagctaacttgcgtttagtaatttccatcgcgaaaaaatacacaaatcgaggtttacaattcttagatttaattcaagaagggaatatcggtttaatgaaagcggtagataaatttgaatatcgacgaggctacaaattctctacatatgctacttggtggattcgtcaagcaatcacacgctctattgcggatcaagcgcgtacaatccgtattcctgtgcatatgattgaaacaatcaataaacttaatcgtatttctcgccagttgttacaagaaatgggacgtgaagcaacaccagaagaattggcagaacgtatgggaatgccagaagataaaatccgtaaagtactgaaaattgcaaaagagccgatttctatggaaacacctattggcgatgacgatgattcacatttaggcgattttattgaagattcaaccttagaacttcctcttgattctgccacagcacaaagtttaaaagttgcaactcacgaagtgctagaaggcttgacgccacgtgaagcaaaagtattacgtatgcgttttggtattgatatgaataccgaccatacacttgaagaagtgggtaaacaattcgatgtaacacgcgaacgtattcgtcaaattgaagcaaaagcattacgtaaattacgtcatcctagccgttctgaaacactgagaagttttttagatgaatag

SEQ ID NO: 1106 - protein, 629 aa, Haemophilus influenzae
MEKNQQSTAEQYSEQIEQLMELGRTQGYLTFAEINDLLPEDAIDPEYYDKLLQTLQNDAGIPVLDEAPESDDMMLSDTIPDEDAVEEATQILSNVESEIGRTTDPVRMYMREMGTVDLLTREDEISIAKRIEGGIDEVQTSIAAYPEALNGLLKNYDDVEKGNFRLTDLITGFVDPNAEIEEHSGLDEDFSDEDDEEESSNADVEDNEDEEDNESESTSDSSDSDNSIDPEVAREKFQQLREQHSKTLAVIEKHGRSGKRAQDQIALLGEIFKQFRLVPKQFDLLVLSMKEMMKRVRYQERQLQKILVDIAGMPKDDFEKIITTNGSNSEWVAKALKSSKPWAKRLIKYEDRIYEALNNLAITEENTKLTITQMRDICDAVARGEQKARRAKKEMVEANLRLVISIAKKYTNRGLQFLDLIQEGNIGLMKAVDKFEYRRGYKFSTYATWWIRQAITRSIADQARTIRIPVHMIETINKLNRISRQLLQEMGREATPEELAERMGMPEDKIRKVLKIAKEPISMETPIGDDDDSHLGDFIEDSTLELPLDSATAQSLKVATHEVLEGLTPREAKVLRMRFGIDMNTDHTLEEVGKQFDVTRERIRQIEAKALRKLRHPSRSETLRSFLDE

SEQ ID NO: 1107 - DNA, 1266 bp, Haemophilus influenzae
atggtaaaaaaagcaacggctttagccaatggcgaattaggtgcaattccaagtgatattgcaaaagcgattgtagcagcttgtgatgaaattcttaccactggaaaatgcttagatcaattcccatcagacgtatatcaaggtggtgcaggtacgtctgtcaatatgaatactaatgaagtggttgctaatcttgcccttgaaaaaattggtcataaaaaaggcgaatataacgtgattaatccgatggatcacgttaatgcaagccaatcaaccaacgatgcgtatcctaccggtttccgtattgcagtgtataacagcatcttaaaattgatcgataaaattcaatatttacacgacggttttgataataaagcaaaagagtttgcaaatatcttaaaaatgggtcgtacccaattgcaagatgcggtgccaatgactgttggtcaagaattcaaagctttcgccgtattacttgaagaagaagtgcgtaacttaaaacgtacagcaggtttattacttgaagtaaaccttggtgcgactgcaatcggtactggtttaaatacgccacaaggctatacagaattagttgtaaaacatcttgctgaagtgactggattagcttgtgtaccagcagaaaacttaattgaagcaacatctgactgtggtgcttatgtcatggttcacggtgcattaaaacgtactgcagtgaaactttctaaagtatgtaatgacttgcgtttactttcttctggccctcgtgcaggtttaaaagaaattaatcttcctgaattacaagcaggttcttctattatgccagcaaaagtaaacccagttgttccagaggtggtaaaccaagtgtgctttaaagtaattggtaacgataccactgtgactttcgcatctgaagcaggtcaattacaattaaacgtaatggaaccagtgattggtcaagcaatgttcgaatctatcgacatcttaaccaatgcttgtgtgaacttacgtgataaatgtgtagatggaatcactgtaaataaagaaatttgtgaaaactacgtgtttaattcaatcggtattgtgacttacttgaatccatttatcggtcaccacaacggcgacttagtgggtaaaatctgtgcacaaacaggcaaaggcgtacgtgaagttgtgttagaaaaaggtttattaacagaagaacaattggatgacattctttctgtagaaaacttaatgaatccaacttacaaagcgaaattaaataaataa

SEQ ID NO: 1108 - protein, 421 aa, Haemophilus influenzae
MVKKATALANGELGAIPSDIAKAIVAACDEILTTGKCLDQFPSDVYQGGAGTSVNMNTNEVVANLALEKIGHKKGEYNVINPMDHVNASQSTNDAYPTGFRIAVYNSILKLIDKIQYLHDGFDNKAKEFANILKMGRTQLQDAVPMTVGQEFKAFAVLLEEEVRNLKRTAGLLLEVNLGATAIGTGLNTPQGYTELVVKHLAEVTGLACVPAENLIEATSDCGAYVMVHGALKRTAVKLSKVCNDLRLLSSGPRAGLKEINLPELQAGSSIMPAKVNPVVPEVVNQVCFKVIGNDTTVTFASEAGQLQLNVMEPVIGQAMFESIDILTNACVNLRDKCVDGITVNKEICENYVFNSIGIVTYLNPFIGHHNGDLVGKICAQTGKGVREVVLEKGLLTEEQLDDILSVENLMNPTYKAKLNK

SEQ ID NO: 1109 - DNA, 249 bp, Haemophilus influenzae
  misc_feature 231, 232, 233, 234, 235: n is any nucleotide
atgaacagcaaattatccctttccaccaaactttcctccagcggtaaaacccagcttgctgaatactttgcgacgccaccgtttaaagtgataacgttgccaagttacgatgatgcgtgggcgaatggcttgaatgcgatgcagatgtcgtcctcccctggcgtgctggcgggcgatctgttagagattgatatttcgttggcaaaattgaccgcactttctttaaatacnnnnncattcattcattaa

SEQ ID NO: 1110 - protein, 82 aa, Haemophilus influenzae
  VARIANT 78, 79: Xaa is any amino acid
MNSKLSLSTKLSSSGKTQLAEYFATPPFKVITLPSYDDAWANGLNAMQMSSSPGVLAGDLLEIDISLAKLTALSLNTXXFIH

SEQ ID NO: 1111 - DNA, 636 bp, Haemophilus influenzae
atgcgtaactacattaaaattggcgtagcaggtcctgttggcgcaggcaaaaccgcgttaattgaaaaactcactcgtgaaatagcgtcaaaatatagcgtagcagtcattactaacgatatttacacccaagaagatgcggaatttttaacgaaaaatagtttgcttccaccagagcgaattatgggcgtggaaacaggcggttgcccgcacacagcaattcgtgaagatgcctcgatgaacttggaagccgtggacgaaatggtggctcgtttccctgatgtggaaatcgtgttcattgaatcaggtggcgataacctttcagcgacttttagccctgatttggcagacgtgacgatttttgtgatcgatgtggctcaaggggaaaaaatccctcgtaaaggtgggccaggtatcactcgttcagatttgttagtgattaacaaaacagaccttgcaccatttgttggcgcggatttaagtattatggaacgcgatgctcgtcttatgcgtaacggtcagccgtttattttcactaacctgatgaaaaaagaaaacctagatggcgtgatcggttggatcgaaaaatatgcgttgttgaagaatgtggaagaacctgcatctttggttcgttaa

SEQ ID NO: 1112 - protein, 211 aa, Haemophilus influenzae
MRNYIKIGVAGPVGAGKTALIEKLTREIASKYSVAVITNDIYTQEDAEFLTKNSLLPPERIMGVETGGCPHTAIREDASMNLEAVDEMVARFPDVEIVFIESGGDNLSATFSPDLADVTIFVIDVAQGEKIPRKGGPGITRSDLLVINKTDLAPFVGADLSIMERDARLMRNGQPFIFTNLMKKENLDGVIGWIEKYALLKNVEEPASLVR

SEQ ID NO: 1113 - DNA, 663 bp, Haemophilus influenzae
ttgcacttggtcgatcccaccttaccgattggtggatttaaccattccaatggcttggaaaccttcgtccagcaacgtgtggtagaaagcaaagcgaccctagaagaatatgtgcaaacccagcttttacaaaactggatttacaacgacggggcgtatctttctcttgcctttgatgcaatgtgtgaggggaattttgaccgcttgtgcgaactggattggcaactttccgccaccaaagtggcacgcgaaagtcgtgaagggagtttcaaactcggtgtgcgattgctgaaaatttttattcgctatgaaacacatgcgttgctcacagcttaccagcaagcgattgcagaaaaacgagtacagggctatttcccaatagtgtttgcgatggttgctcaagccatgggcttaaccaaagccgacacactctatgcgttctactacaacacagcagttggtgtaatcactaacggcgtgaagctaattcctctcagccaaatggatggacaagatattttgtttgacttgcgaggatcgctcgtacaagcggtggaattaagctttgaccctgacgaagaatggcttggtgcggcaacgctggcgaatgatattcgggctatgcaacacgaagtgctttatacgcgactttatatgtcgtaa

SEQ ID NO: 1114 - protein, 220 aa, Haemophilus influenzae
MHLVDPTLPIGGFNHSNGLETFVQQRVVESKATLEEYVQTQLLQNWIYNDGAYLSLAFDAMCEGNFDRLCELDWQLSATKVARESREGSFKLGVRLLKIFIRYETHALLTAYQQAIAEKRVQGYFPIVFAMVAQAMGLTKADTLYAFYYNTAVGVITNGVKLIPLSQMDGQDILFDLRGSLVQAVELSFDPDEEWLGAATLANDIRAMQHEVLYTRLYMS

SEQ ID NO: 1115 - DNA, 558 bp, Haemophilus influenzae
atgaaaataattaacccaattctccctattatagaaaatattttgggaaatttaaccgcacttcaagcagatggcaaaattaccacacagcccattgaacgaatagcattgcagtggtatgaaagcgaacggaatattttgcgtaaaactacaaatacggggcgtgaagtagcatttcgcttgctaaaagaggggcaacgcttgaaacacgatgatgtagtgtttatcagcgatgaattagtgattgcgattgaaattttaccgagtgacgtgattgtgctgtcgccgaaaaccttgcctgaaatggctcgagcttgttatgaaatcggcaacaaacattcgccgctttttttagatggcgatgaagtaacattaccttacgataagccgatgtttgaatggctgcaagctgcgggatttcatccgcaaaaagcagaacgccgtttaagccaagcgttaagagcaaattctgcacaagggcacggacattctcatagccattcgcatgatcatcatggctatcatcatcacggagatggacattggcacaaacattaa

SEQ ID NO: 1116 - protein, 185 aa, Haemophilus influenzae
MKIINPILPIIENILGNLTALQADGKITTQPIERIALQWYESERNILRKTTNTGREVAFRLLKEGQRLKHDDVVFISDELVIAIEILPSDVIVLSPKTLPEMARACYEIGNKHSPLFLDGDEVTLPYDKPMFEWLQAAGFHPQKAERRLSQALRANSAQGHGHSHSHSHDHHGYHHHGDGHWHKH

SEQ ID NO: 1117 - DNA, 1719 bp, Haemophilus influenzae
atggcattaacaatttcaagagctcaatacgtagcaacttatggcccaacagttggcgataaagtccgtttaggcgataccaatttatgggcaaccattgaacaagatttattgaccaaaggcgacgagtgtaaatttggtggcggtaaaagcgtgcgtgatggcatggctcaaagcggtacggcaactcgcgacaatccgaatgtattggattttgtgattaccaacgtgatgatcattgatgctaaattaggcattatcaaagcagatattggtattcgtgatgggcgtattgtgggcattggacaagcaggtaaccctgacaccatggataacgtcacaccaaacatgattatcggtgcaagcacagaagttcataacggtgcacatttaattgcaaccgctggcggtattgatacccacattcactttatttgtccgcaacaagcacaacatgcaattgaaagtggcgttaccacgttaattggtggtggaactggcccggctgatggtacacacgcaaccacttgtacccctggcgcatggtatatggaacgtatgtttcaagcggcagaagccttgcctgtaaacgtcggattttttggtaaaggcaactgttcaaccctagatcctctgcgtgagcaaattgaagcgggtgcattaggtttaaaaatccatgaagactggggcgcaacgcctgcagtaattgattctgcattaaaagtggcagatgaaatggatattcaagtggccattcacacagacacgctaaatgaaagtggcttcttagaagataccatgaaagcaattgatggacgtgtcattcacaccttccacacggaaggggcgggtggtggtcatgcacctgacatcattaaagcagcgatgtattcaaacgtattacctgcttcaaccaacccgactcgtccgtttaccaaaaacaccattgatgaacacttggatatgttgatggtttgccatcacttagataaacgcgtgccggaagacgtagcttttgccgatagccgtatccgccctgaaaccattgcggcagaagatattttgcatgatatgggcgtcttctccattatgagttcagactctcaagcgatggggcgtattggtgaagtggtaattcgtacatggcaaactgcagataagatgaaaatgcaacgtggtgagctaggtaatgaaggaaacgataacttccgtattaaacgctacattgcgaaatacaccatcaacccagcaattgcacatggtattgcggagcatattggctcgttagaagtgggtaaaatcgcagatatcgtgttatggaaaccgatgttctttggcgtaaagcctgaagtcgtaattaaaaaaggctttattagctacgccaaaatgggcgacccaaatgcttcaattccaacgccacagccagtgttctaccgcccaatgtatggtgcacaaggcttagcaacggcacaaacagcggtattttttgtttcacaagccgctgaaaaagccgatattcgtgcgaagttcggtttacacaaagaaaccattgctgtgaaaggctgccgcaacgtgggtaaaaaagatctggttcataatgatgtaacaccaaatattactgttgatgctgaacgttatgaagttcgagtggacggagagttaattacctgtgaaccagtggatagcgtaccattgggtcagcgatatttcctattctaa

SEQ ID NO: 1118 - protein, 572 aa, Haemophilus influenzae
MALTISRAQYVATYGPTVGDKVRLGDTNLWATIEQDLLTKGDECKFGGGKSVRDGMAQSGTATRDNPNVLDFVITNVMIIDAKLGIIKADIGIRDGRIVGIGQAGNPDTMDNVTPNMIIGASTEVHNGAHLIATAGGIDTHIHFICPQQAQHAIESGVTTLIGGGTGPADGTHATTCTPGAWYMERMFQAAEALPVNVGFFGKGNCSTLDPLREQIEAGALGLKIHEDWGATPAVIDSALKVADEMDIQVAIHTDTLNESGFLEDTMKAIDGRVIHTFHTEGAGGGHAPDIIKAAMYSNVLPASTNPTRPFTKNTIDEHLDMLMVCHHLDKRVPEDVAFADSRIRPETIAAEDILHDMGVFSIMSSDSQAMGRIGEVVIRTWQTADKMKMQRGELGNEGNDNFRIKRYIAKYTINPAIAHGIAEHIGSLEVGKIADIVLWKPMFFGVKPEVVIKKGFISYAKMGDPNASIPTPQPVFYRPMYGAQGLATAQTAVFFVSQAAEKADIRAKFGLHKETIAVKGCRNVGKKDLVHNDVTPNITVDAERYEVRVDGELITCEPVDSVPLGQRYFLF

SEQ ID NO: 1119 - DNA, 306 bp, Haemophilus influenzae
atgatcccaggcgaataccaattagccgaaggcgatattctcgctaatgtcggcagaaaaaccgtaaaaatcgaagtaaccaattcaggcggccgcccaattcaagttggctcgcattaccatttttttgaaaccaataatgcccttaaatttaaccgcactttggcacgtggaatgcgtttaaacgtgccatctggcaatgcggtgcgttttgaacccggtgaagtgaaatcagtggaattagttgcttttggtggtaaccaaatcatttatggtttccataatcaaattgatggcaaattataa

SEQ ID NO: 1120 - protein, 101 aa, Haemophilus influenzae
MIPGEYQLAEGDILANVGRKTVKIEVTNSGGRPIQVGSHYHFFETNNALKFNRTLARGMRLNVPSGNAVRFEPGEVKSVELVAFGGNQIIYGFHNQIDGKL

SEQ ID NO: 1121 - DNA, 303 bp, Haemophilus influenzae
atgcacttaacttccagagaacaagaaaaactgatgcttttccttgcgggcgaacttgcggcaaaacgcaaagcacgcggcgttaaattaaactatccagaaactattgcttatattgctagccatttacaagaggcagcaagagacggaatgagtgtagcggaagtcatgcaatatggcgcaacacttttaaccgttgatgatgtcatggaaggtgtggcagaaatggttcatgaagtccagattgaagctactttcccagatggtacaaaacttgttaccgtgcataatccaatcagataa

SEQ ID NO: 1122 - protein, 100 aa, Haemophilus influenzae
MHLTSREQEKLMLFLAGELAAKRKARGVKLNYPETIAYIASHLQEAARDGMSVAEVMQYGATLLTVDDVMEGVAEMVHEVQIEATFPDGTKLVTVHNPIR

SEQ ID NO: 1123 - DNA, 291 bp, Haemophilus influenzae
atgaatattcgtcctttacacgatcgtgtaattattaaacgtgaagaagtcgaaacccgttcagctggcggtatcgtattaaccggttcagcagcgactaaatcaacccgtgcgaaagtattagctgtgggtaaaggtcgtattttagaaaatggcaccattcaacctttagatgttaaagttggcgataccgtaattttcaacgacggttacggtgtgaaaagcgaaaaaatcgatggtgaagaagtgttaatcatttctgagaacgacatcctagcaattgtagaataa

SEQ ID NO: 1124 - protein, 96 aa, Haemophilus influenzae
MNIRPLHDRVIIKREEVETRSAGGIVLTGSAATKSTRAKVLAVGKGRILENGTIQPLDVKVGDTVIFNDGYGVKSEKIDGEEVLIISENDILAIVE

SEQ ID NO: 1125 - DNA, 1647 bp, Haemophilus influenzae
atggcagcaaaagacgtaaaatttggtaatgacgcacgcgtaaaaatgcttaaaggcgtgaatgtattagcggatgcagtaaaagtaacccttggcccaaaaggtcgtaatgtaattttagataaatcatttggcgcaccaactatcactaaagacggtgtgtctgttgctcgtgaaatcgaattagaagataaattcgagaacatgggggcacaaatggtgaaagaagtggcatctaaagcaaatgatgcagcaggtgacggtacaactactgcaactgtacttgcgcaagctatcgtaaatgaaggcttgaaagcagtagctgcaggtatgaatccaatggatttaaaacgtggtattgataaagcagtaagtgcggttgtttctgaacttaaaaatttatctaaaccttgtgaaacagcaaaagaaattgaacaagtaggtaccatttctgcaaactctgacagcattgtgggtcaattaatctcacaagcaatggaaaaagtgggcaaggaaggtgtaattactgttgaagatggtacgggtcttgaagatgaattagatgtggttgaaggcatgcaattcgaccgtggttacctttctccatatttcatcaacaaaccggaaactgcaacggttgaattagataatccatatcttcttcttgtagataaaaaaatctctaacattcgtgaattacttcccgtgttagaaggcgttgcgaaagcaggtaaaccgttattaatcatcgctgaagatgtggaaggcgaagcgcttgcaaccttagtagtaaacactatgcgcggtatcgtgaaagttgcagcagtgaaagcaccaggttttggtgatcgtcgtaaagcgatgttacaagatattgcaattttaacagcgggtactgtgatttctgaagaaattggtatggagcttgaaaaagcaacattggaagatttaggtcaagcaaaacgcgttgttattaataaagataacacaaccattattgatggtatcggcgatgaagcacaaatcaaaggtcgtgtggctcaaattcgtcagcaaatcgaagaatcaacttctgactacgacaaagaaaaactccaagaacgcgtggctaaattagcaggcggtgtggcagtaatcaaagtgggcgcagcaactgaagttgaaatgaaagagaaaaaagaccgtgtagatgatgcactacatgcaactcgtgcagcggttgaagaaggtatcgttgctggtggtggcgttgcattagttcgtgcagcagcgaaagttgcagcaagcctaaaaggtgacaacgaagaacaaaatgtgggtatcaaacttgcattacgtgcgatggaagcgcctttacgtcaaatcgtcactaacgcaggtgaagaagcatcggttgtggcaagtgcggttaaaaatggcgaaggaaactttggttataatgcaggaacagaacaatacggcgatatgatcgaaatgggtatcttagatccaactaaagtcactcgttctgcattgcaattcgcagcttctgtagcaggcttaatgattaccactgaatgtatggtaactgatcttccaaaagatgataaagccgatttaggtgctgctggaatgggcggtatgggtggaatgggcggaatgatgtaa

SEQ ID NO: 1126 - protein, 548 aa, Haemophilus influenzae
MAAKDVKFGNDARVKMLKGVNVLADAVKVTLGPKGRNVILDKSFGAPTITKDGVSVAREIELEDKFENMGAQMVKEVASKANDAAGDGTTTATVLAQAIVNEGLKAVAAGMNPMDLKRGIDKAVSAVVSELKNLSKPCETAKEIEQVGTISANSDSIVGQLISQAMEKVGKEGVITVEDGTGLEDELDVVEGMQFDRGYLSPYFINKPETATVELDNPYLLLVDKKISNIRELLPVLEGVAKAGKPLLIIAEDVEGEALATLVVNTMRGIVKVAAVKAPGFGDRRKAMLQDIAILTAGTVISEEIGMELEKATLEDLGQAKRVVINKDNTTIIDGIGDEAQIKGRVAQIRQQIEESTSDYDKEKLQERVAKLAGGVAVIKVGAATEVEMKEKKDRVDDALHATRAAVEEGIVAGGGVALVRAAAKVAASLKGDNEEQNVGIKLALRAMEAPLRQIVTNAGEEASVVASAVKNGEGNFGYNAGTEQYGDMIEMGILDPTKVTRSALQFAASVAGLMITTECMVTDLPKDDKADLGAAGMGGMGGMGGMM

SEQ ID NO: 1127 - DNA, 450 bp, Haemophilus influenzae
atgcaagtaattcttttagataaaattgttcacttaggtcaagtgggcgatcaagtaaatgttaaatcaggttttgcacgtaacttcttaatcccacaaggtaaagctgttatggcaactaaagctaacattgaacactttgaagcacgtcgtgcagaattagaagcgacagcggcagcaaatcttgcagcagctcaagctcgtgcagcagaagttactgcattaggttctgtgactatcgcatctaaagcaggtgatgaaggtcgtttattcggcgcaatcactactcgtgatgtggcagaggcagtaactgcagcaggcgttaaaattgcgaaaagtgaagttcgtttatcaaacggtccaatccgtactcttggtgaccacgatgttcgtttccaacttcacggtgaagtatttgcagcattagatgtaatcgttgttgcagaataa

SEQ ID NO: 1128 - protein, 149 aa, Haemophilus influenzae
MQVILLDKIVHLGQVGDQVNVKSGFARNFLIPQGKAVMATKANIEHFEARRAELEATAAANLAAAQARAAEVTALGSVTIASKAGDEGRLFGAITTRDVAEAVTAAGVKIAKSEVRLSNGPIRTLGDHDVRFQLHGEVFAALDVIVVAE

SEQ ID NO: 1129 - DNA, 228 bp, Haemophilus influenzae
atggcacgttatttccgtcgtcgtaagttctgccgtttcacagcggaaaatgttgttgaaatcgattacaaagatatcgctacattaaagaactatatttcagaaagcggcaaaattgtacctagccgtattaccggtactcgtgcgaagtaccaacgtcaattagctcgtgcaatcaaacgcgctcgctatttagcgttacttccatacactgacaatcatcagtaa

SEQ ID NO: 1130 - protein, 75 aa, Haemophilus influenzae
MARYFRRRKFCRFTAENVVEIDYKDIATLKNYISESGKIVPSRITGTRAKYQRQLARAIKRARYLALLPYTDNHQ

SEQ ID NO: 1131 - DNA, 327 bp, Haemophilus influenzae
atgctgaagagtaatttgaaaattgataatcgtttttcggttatgggagtcgtttctcagttaccaaagcgattaaaaagccctagtggaattgagcattgcaagtttttgttagaacatcgttctgatcagattgaaagtggtttcacacgtcaagcttggttaaagatgccagttcaaattagtggtaatcaattgatagaaaaaactcaaagcattacggtcggtagtaaaattttggtggtgggatttattacatcacataaaacccaaagtgggttatgccaattagttttacatgccgagcaaatcgaatttatagattag

SEQ ID NO: 1132 - protein, 108 aa, Haemophilus influenzae
MLKSNLKIDNRFSVMGVVSQLPKRLKSPSGIEHCKFLLEHRSDQIESGFTRQAWLKMPVQISGNQLIEKTQSITVGSKILVVGFITSHKTQSGLCQLVLHAEQIEFID

SEQ ID NO: 1133 - DNA, 378 bp, Haemophilus influenzae
atgcgtcactacgaaatcgtgtttatggttcatccggaccaaagcgagcaagtaccaggtatgatcgaacgttacaccggttctgtaaaagaagctggtggtcaagttcatcgcctagaagattggggtcgtcgccaattagcgtacccaattaataaattacacaaagcacattatgtgcttatgaatgtagaagcgcctcaacaagtcatcgacgagctagaaacgactttccgttataacgatgctgtattacgcagtcttgttatccatactaagcacgccgtaaccgaagcgtccccaatgaaagcggctaaagaagaacgtaaacctttagctgaagttgaaaacaacgattttgaggatgctgaagagtaa

SEQ ID NO: 1134 - protein, 125 aa, Haemophilus influenzae
MRHYEIVFMVHPDQSEQVPGMIERYTGSVKEAGGQVHRLEDWGRRQLAYPINKLHKAHYVLMNVEAPQQVIDELETTFRYNDAVLRSLVIHTKHAVTEASPMKAAKEERKPLAEVENNDFEDAEE

SEQ ID NO: 1135 - DNA, 219 bp, Haemophilus influenzae
atggcgaaagaagattgcattgagatgcaaggcacaattttagagactttaccgaatactatgtttcgcgtggagttagaaaacggtcacgtggttactgcacatatttctggaaaaatgcgtaaaaactatatccgcattttgactggggataaagtgactgtagaaatgaccccttatgatttaagtaaaggtcgtattattttccgcagtcgttaa

SEQ ID NO: 1136 - protein, 72 aa, Haemophilus influenzae
MAKEDCIEMQGTILETLPNTMFRVELENGHVVTAHISGKMRKNYIRILTGDKVTVEMTPYDLSKGRIIFRSR

SEQ ID NO: 1137 - DNA, 993 bp, Haemophilus influenzae
atgcaatcttctttcgccattgtatcctctaaaaataatcgattttttatccgcactttaggcggaaaagttaagaaaaacgggcggattatagccgtttttaatgttagacgaaagattaaaataaaattgaacagaaaaaaaataacccctataatgcaaaagccttttctcagtaagtatgatcctcaaatgcatataaattacgttattagtcttacttcagcatatcaacgacgagagcatattcaaaaagaattctctcaacaaaacattccttttgaattttttgatgctttaaaaccttcaaaagaactaacctcgttaatagaaaaatttatccctaatctactccatgcaaagttaactgagggagaaaaagcatgttttatgagccattacatgctatggcaaaaatgcttgtccgaagatctaccctatatttacatttttgaagatgatgtattattaggtgagaatgcagacaaatttctagctgaagatgaatggttagaagaacgttttaaacaaactgataaatttattttaagatttgaaacattcctaaatttttctaaatgtaaagataaaaaaattaaaccttattcaggtagaaaaatattaaaactagtatcagaaaattgtggtgccgcagggtatgttatatctagagaagcagttaaacaactaagtgctcatatctgttcgctcacatccaaccatctactcgcgatagatttattaatgtttaatatatttaatcagtctacataccaggtatcaccaggtgtatgtgttcaagaaggacagctatatccaaaggatataaaattacatagtcagttagaaacggaaagacaaaaatatcttagtgtaaagaaaaaaagaacactaaaaacagtattaatatctttagcaggaaaacctaaaaaaatattgagaaaaatatacagaaagctatttatttctaaacacatagtaccatttagataa

SEQ ID NO: 1138 - protein, 330 aa, Haemophilus influenzae
MQSSFAIVSSKNNRFFIRTLGGKVKKNGRIIAVFNVRRKIKIKLNRKKITPIMQKPFLSKYDPQMHINYVISLTSAYQRREHIQKEFSQQNIPFEFFDALKPSKELTSLIEKFIPNLLHAKLTEGEKACFMSHYMLWQKCLSEDLPYIYIFEDDVLLGENADKFLAEDEWLEERFKQTDKFILRFETFLNFSKCKDKKIKPYSGRKILKLVSENCGAAGYVISREAVKQLSAHICSLTSNHLLAIDLLMFNIFNQSTYQVSPGVCVQEGQLYPKDIKLHSQLETERQKYLSVKKKRTLKTVLISLAGKPKKILRKIYRKLFISKHIVPFR

SEQ ID NO: 1139 - DNA, 1053 bp, Haemophilus influenzae
atgactaaattaataacaatttcactaacttgccaaaaatttcaatatggcggaggaatggaaagatatcttcttgatattgttaatggattatctaagacaaatattacacctaaaatctactctgccaaatttgatactgcattacctgaatacgatttgattaatccagttaagattaatctttcttttgtgcctaaaaaatggagaacctcgtttctttcctatttttcaaataaatataaagagatatcagaagtctcacttaccacctcttataccctatctgacgtggttatttatggtggaaatcataaaggatatctacaagcatcaaagaaaaagccaagcatatcagatcgatttaaaatcatgggtgaacaaaaatccttaaatcaatccaaatatgtcatcgctcattctgcattgatgaaaaaagaactcgttgagttatatcatatcccagaaaacaaaattgatgtgatttatccccccattaatacagataaattcacacaaatcaatgaagaagaaagagtaaaactcagagaaaagttgggtttcaaaaaagatgaaatcatttacctatttccttctactgggcatacgcgaaaaggctttgatattttaaaacaatattttgaaaacacccagttacctattcgcttagtggtagcaggaacgcctgtagaagaaaatcctaaaatatcttcgcttggtttttgcaaaaatatgcctgaattatataaagcggcagatttcaccattatggcatctcaatatgagccatttgggcttgttggactagaatccatattatctggtacgccagttattttttctgaaaacatgggatgcctagaagtattacaaaacgaatttggctatacattttctagagaaaacataagtactttagatgatgcaattcaaaaatcagtaaaacaagcatctgaacagcaacaccgtattttcaatccaatggactgtattcgttataatccaagtttgagtcatcatattaaaacaatactggaactcatcgctaaatga

SEQ ID NO: 1140 - protein, 350 aa, Haemophilus influenzae
MTKLITISLTCQKFQYGGGMERYLLDIVNGLSKTNITPKIYSAKFDTALPEYDLINPVKINLSFVPKKWRTSFLSYFSNKYKEISEVSLTTSYTLSDVVIYGGNHKGYLQASKKKPSISDRFKIMGEQKSLNQSKYVIAHSALMKKELVELYHIPENKIDVIYPPINTDKFTQINEEERVKLREKLGFKKDEIIYLFPSTGHTRKGFDILKQYFENTQLPIRLVVAGTPVEENPKISSLGFCKNMPELYKAADFTIMASQYEPFGLVGLESILSGTPVIFSENMGCLEVLQNEFGYTFSRENISTLDDAIQKSVKQASEQQHRIFNPMDCIRYNPSLSHHIKTILELIAK

SEQ ID NO: 1141 - DNA, 864 bp, Haemophilus influenzae
atgaactcaaaaaaacacttaggccatacggcgcgtaaacgctttggtcaaaactttttacataatacttctgtcattcaaggtatcgtggcggcgatttacccacaacccaatcaattcttggtggaaattggtccagggcttggtgcattaacagagcctgttggtgaacttgtcgatcatctgactgtggtagagcttgaccgagaccttgcagaacgtttacgtcatcatccatttttacatcaaaagctaaccgttattgaaacggatgcgatgcaatttgattttggtgagctttatacaaaagaaaatttggcagaaaaagggcaaaaattgcgtgtgtttggtaacttgccttacaacatttctaccccattgatgttccacttgtttaaatatcatgatgtgattcaagatatgcactttatgctgcaaaaagaagtggtaaaacgcctatgtgccgcaccaaatagcaaagcttatggtcgtttaacgattatggcgcaatatttctgccaagtgatgcctgtgcttgaagtaccgccttcggcattcaaacctgcaccgaaagtagattcagccgttgtgcgtttaattccgcataaggaattgccgcaccctgtaaaagatttatattggttgaaccgtgtttgctcccaagcgttcaatcaacgtcgtaaaacattacgcaatgcactctcaactctattttcacctgaaaatctgaccgcacttggtattgatttaaatgcacgtgcagaaaatttggctatcgcagattatgcacgtttagcgaactggttagcggataatccaccagcagatgtcaataaagatgaaatcttagattcagaagagtaa

SEQ ID NO: 1142 - protein, 287 aa, Haemophilus influenzae
MNSKKHLGHTARKRFGQNFLHNTSVIQGIVAAIYPQPNQFLVEIGPGLGALTEPVGELVDHLTVVELDRDLAERLRHHPFLHQKLTVIETDAMQFDFGELYTKENLAEKGQKLRVFGNLPYNISTPLMFHLFKYHDVIQDMHFMLQKEVVKRLCAAPNSKAYGRLTIMAQYFCQVMPVLEVPPSAFKPAPKVDSAVVRLIPHKELPHPVKDLYWLNRVCSQAFNQRRKTLRNALSTLFSPENLTALGIDLNARAENLAIADYARLANWLADNPPADVNKDEILDSEE

SEQ ID NO: 1143 - DNA, 939 bp, Haemophilus influenzae
ttgttgatttattctttttgtatagtagaatgcgaaaaatttagttatttccatttttatttaaatatgagtgctattgaaaatattgtcattagtatggaaaatgcaactgaacgtcgcaaacatattactaagcaatttgaatcaaaaaacctttcatttagtttctttaatgcgtacacttatcaatcaatcaatcaatcaatcaatcaatcaatcaatcaatcaatcaatcaatcaaactccatattacataatatagaggaatctagaatacttactaaaggagaaaaaggctgtttaattagccatttcttattatggaataagtgtgtgaatgaaaatttggaatatctcaaaatttttgaagatgatgtaattcttggcgagaatgcggaagtatttttgaaccaaaatgaatggttaaaaacacgttttgattttaatgatatttttattattcgtttagaaacttttttacggccagttaaacttgagaaacaaactaaaattccaccttttaattctaggaactttgatattttaaaatcaactcactgggggacggcaggttatattatttctcaaggtgcggctaaatatgtaattgaatatttaaagaatattccttctgatgaaattgttgcagttgatgaacttatttttaataaattagttgatgttgataattatattgtctatcaactgaatccagcaatttgtattcaagaactccaagcgaatcaaagtaaaagtgtattaacaagcggattggaaaaagaacgacaaaaacgtccaaaaatccgtaagaaaaagacattgaaacagcgtttaactcggataaaagaaaatattatacgagctttaaatagaaaaaaatggaaagaacaacaacgtattaaagaaatgcaaggtaaagaaattgttcgttttatgtag

SEQ ID NO: 1144 - protein, 312 aa, Haemophilus influenzae
MLIYSFCIVECEKFSYFHFYLNMSAIENIVISMENATERRKHITKQFESKNLSFSFFNAYTYQSINQSINQSINQSINQSNSILHNIEESRILTKGEKGCLISHFLLWNKCVNENLEYLKIFEDDVILGENAEVFLNQNEWLKTRFDFNDIFIIRLETFLRPVKLEKQTKIPPFNSRNFDILKSTHWGTAGYIISQGAAKYVIEYLKNIPSDEIVAVDELIFNKLVDVDNYIVYQLNPAICIQELQANQSKSVLTSGLEKERQKRPKIRKKKTLKQRLTRIKENIIRALNRKKWKEQQRIKEMQGKEIVRFM

SEQ ID NO: 1145 - DNA, 828 bp, Haemophilus influenzae
atggcaacctatttcgtcggtgatttgcaaggctgttatgatgaattacagcttttattagaacgtgtagatttcaatcctacgcaagataaactttatcttgtgggagatcttgtggcgcgtggggataaatcacttgaatgtcttcgttttgtaaaatcacttggtaatgcagcgcaaaccgtactaggcaatcacgatttacatttaattgcgaccgcactggacattaaaaaagtgaaactgcgtgatcgtgttgatgccatttttaatgcgcccgattttgatgagctgattcattggttacgtcatcagccattacttgtgcataatgaaaagttaaacttcctgatggtgcatgcaggcatttcacctgattgggatttgaaaactgcgaaatcttgtgcggctgaagttgaacagattttacagcacggcgattttcattatctcattgaaaatatgtattctgaacagcctgatcgctggtcgccagatttacagggcttagcacgtcatcgctacattattaatgctttcactcgaatgcgtttttgctatttggatcatcgctttgattttgcttgtaaatcccctttaaaagatgcaccagcggagctcacgccttggtttaatttagataatccactttataaacagattcccattgtctttggacattgggcaagtttagtcgatgagcctactccaaaaggtatttatgccttagatacgggttgtgtgtggaataatcgaatgactatgttgcgttgggaagacaaacagttcttcacacaaagcgcggtcaaaaattacagtgatttttaa

SEQ ID NO: 1146 - protein, 275 aa, Haemophilus influenzae
MATYFVGDLQGCYDELQLLLERVDFNPTQDKLYLVGDLVARGDKSLECLRFVKSLGNAAQTVLGNHDLHLIATALDIKKVKLRDRVDAIFNAPDFDELIHWLRHQPLLVHNEKLNFLMVHAGISPDWDLKTAKSCAAEVEQILQHGDFHYLIENMYSEQPDRWSPDLQGLARHRYIINAFTRMRFCYLDHRFDFACKSPLKDAPAELTPWFNLDNPLYKQIPIVFGHWASLVDEPTPKGIYALDTGCVWNNRMTMLRWEDKQFFTQSAVKNYSDF

SEQ ID NO: 1147 - DNA, 624 bp, Haemophilus influenzae
atgctctcgcttacgactgaatcttgcgaactgttcaacattcctttctaccaattcgcccaaatgaaaaaattctgcccagaaaatattccagcgattaaagcggattacaaattacattgggataattggaaagcgataattcaatctgtttcagcacaactcagtacgccttttgcgaaaccgcatattgaaagctggaccaatggttggcaagtgcggactcatttcttcgcttattttaaatacgagtttaaccaaaattctgccgcaatcttttctgtgctattaaatcgtcgccgactaagagtgtgtttagattggcattgctatcgtgcagatcgctcacaaattaatgtgcaacaatataatcagtggcttgatcaatttgatttcaaacaatttgctgattttgagatttggcgagaggatgaaagtgaatatgatgattttcgccaagtgaaggtcatttctgaaaaaaatctgatcttacgttcagatgaggatttttggtgcattgggaaaagtattgaaaaagccgagttaaatcaaatagatcccgttttatttattacgcacaccattcaacaattacaaccgctttacgatcgctgccatcaataa

SEQ ID NO: 1148 - protein, 207 aa, Haemophilus influenzae
MLSLTTESCELFNIPFYQFAQMKKFCPENIPAIKADYKLHWDNWKAIIQSVSAQLSTPFAKPHIESWTNGWQVRTHFFAYFKYEFNQNSAAIFSVLLNRRRLRVCLDWHCYRADRSQINVQQYNQWLDQFDFKQFADFEIWREDESEYDDFRQVKVISEKNLILRSDEDFWCIGKSIEKAELNQIDPVLFITHTIQQLQPLYDRCHQ

SEQ ID NO: 1149 - DNA, 1455 bp, Haemophilus influenzae
atgtcagtaaaaggcgacatcggtgttatcggcttagccgtaatggggcaaaacctcattttaaatatgaacgaccacgggtttaaagtcgtggcatataaccgtaccacttcaaaagtggatgaatttttacaaggtgcggcaaaaggcaccaatattatcggagcatactctttagaagatttagctgctaaattagaaaaaccacgtaaagtgatgttaatggtacgcgcaggcgatgtggtggatcaattcattgaagcattactaccgcatttagaagaaggcgacatcattattgatggcggtaactcaaactacccggatacgaaccgtcgagtgaaagccttggcggagaaaggtattcgctttatcggttcgggtgtgtctggtggcgaagagggggcgcgtcacgggccttcaattatgccgggcggtaatcaagaagcgtggcagtatgtgaaacctattttccaagcaatctcagctaaaacagaacaaggcgaaccttgttgtgactgggtcggcggcgaaggtgctggtcattttgtgaaaatggttcacaatggtattgaatatggcgatatgcagttaatttgcgaagcataccaattcttaaaagaaggtttaggcttaagctatgaagaaatgcaagccatcttcgcagaatggaaaaatactgaacttgatagctatttaatcgatatcaccactgacattcttggctataaagatgcaagtggagaacctttagtcgaaaaaatcttggatactgcaggtcaaaaagggacaggtaaatggacaggtatcaatgcgttagattttggtattccattaactttaatcactgaatccgtttttgcacgctgcgtgtcttcctttaaagatcaacgtgttgcggctaatcaattattcggcaaaactattacaccagttgaaggcgacaaaaaagtatggattgaagcggtacgtaaagcattattagcgtcaaaaattatttcttacgcacaaggctttatgctgattcgtgaagcctcagaacaatttggttgggatattaactatggtgcaactgcgttgttatggcgtgaaggttgtatcattcgtagccgtttcttaggtaatattcgcgatgcttatgaagcaaatccaaatcttgttttcttaggttcagatagctacttcaaaggcattttagaaaacgcattaagtgactggcgtaaagtggtggcaaaatctatcgaagtgggtatcccaatgccttgtatggcgtctgcgattactttcttagatggctatacttcagcacgtttaccagcaaacttattgcaagcacaacgcgactacttcggtgctcatacttatgaacgcacagataaacctcgtggcgagtttttccacaccaactggactggtcgtggcggtaatacagcatcaactacttatgatgtgtag

SEQ ID NO: 1150 - protein, 484 aa, Haemophilus influenzae
MSVKGDIGVIGLAVMGQNLILNMNDHGFKVVAYNRTTSKVDEFLQGAAKGTNIIGAYSLEDLAAKLEKPRKVMLMVRAGDVVDQFIEALLPHLEEGDIIIDGGNSNYPDTNRRVKALAEKGIRFIGSGVSGGEEGARHGPSIMPGGNQEAWQYVKPIFQAISAKTEQGEPCCDWVGGEGAGHFVKMVHNGIEYGDMQLICEAYQFLKEGLGLSYEEMQAIFAEWKNTELDSYLIDITTDILGYKDASGEPLVEKILDTAGQKGTGKWTGINALDFGIPLTLITESVFARCVSSFKDQRVAANQLFGKTITPVEGDKKVWIEAVRKALLASKIISYAQGFMLIREASEQFGWDINYGATALLWREGCIIRSRFLGNIRDAYEANPNLVFLGSDSYFKGILENALSDWRKVVAKSIEVGIPMPCMASAITFLDGYTSARLPANLLQAQRDYFGAHTYERTDKPRGEFFHTNWTGRGGNTASTTYDV

SEQ ID NO: 1151 - DNA, 543 bp, Haemophilus influenzae
atgactacgaaatataatgcaggtattcatcatcgaagatcgattcgtttaaaacattataattatcgttctgaaggattttatttcatcaccatttgttgtaaaaataaagaatgtctatttgggcatatcattaatcaacaaatgcaattaaatgatttagggaattacgtaaaacagtgttgggaaaatattccaatgttctttccacaagtacgaattgatgaatttgttattatgccaaatcatttacacggtattattgaaattattgaacaggtaaagggcaaatgtaatttgcccctacaatcgagaataacgcagttgccacaaaagggaacatctcaaacaattggctcaatagttcgtggatttaaagcaggtgtaacatcttgggcaagaaaaaatagtgaaatttttgatgtttggcagcgaaattattatgaacatattattcgtgatgaaaaatcctatttgcagatttatgaatatattcaaaataatcctattttatgggaacaagatcaattatatgtagattaa

SEQ ID NO: 1152 - protein, 180 aa, Haemophilus influenzae
MTTKYNAGIHHRRSIRLKHYNYRSEGFYFITICCKNKECLFGHIINQQMQLNDLGNYVKQCWENIPMFFPQVRIDEFVIMPNHLHGIIEIIEQVKGKCNLPLQSRITQLPQKGTSQTIGSIVRGFKAGVTSWARKNSEIFDVWQRNYYEHIIRDEKSYLQIYEYIQNNPILWEQDQLYVD

SEQ ID NO: 1153 - DNA, 93 bp, Haemophilus influenzae
ttgagccaattgtttgagatgttcccttttgtggcaactgcgttattctcgattgtaggggcaaattacatttgccctttacctgttcaataa

SEQ ID NO: 1154 - protein, 30 aa, Haemophilus influenzae
MSQLFEMFPFVATALFSIVGANYICPLPVQ

SEQ ID NO: 1155 - DNA, 213 bp, Haemophilus influenzae
gtgttcgccaatcaagggttatacaacggctttttggcagcagggattatttttggttatgccatcaaccaaatttcggtgatttatttctttttaggttgtgtgattatcgccgcagtttttggggcggttacgacgaagaataaggggatattggtaaagcaggggttgttgcctgcagtgttggcaatagttttgcaaatggttgcataa

SEQ ID NO: 1156 - protein, 70 aa, Haemophilus influenzae
MFANQGLYNGFLAAGIIFGYAINQISVIYFFLGCVIIAAVFGAVTTKNKGILVKQGLLPAVLAIVLQMVA

SEQ ID NO: 1157 - DNA, 699 bp, Haemophilus influenzae
atgaactatatcagcttcccaactgctcaacatgcagtcgataaaattgcacaagaatttgtgatttatagtcaattaaatcatcctgtacatatttccctttctggtggttcaacgcctaagttattatttaaaaccctagctaaatcaccttatgctgaacaaattaactggaaaaatctgcatttttggtggggagatgatcgtatggttccgccatctgatcctgaaagcaattatggcgaagtgcagaaactcttattcgatcatattcaaattccaacggaaaatatccatcgaattcgtggtgaaaatgaaccgcactttgaactaaaacgcttcgaagaagaattaagtgcggtcattccaaacggtgtttttgattggattattttaggcatggggattgatggtcataccgcctctctcttcccacatcaaactaattttgatgatgaaaacctagctgtcattgctaagcaccctgaaagcggtcaaatccgcatttctaaaacagccaaactcattgaacaagccaaacgtattacctatttagtcactggcgaaagcaaagcagatattttaaaagaaatccaaacgacaccagctaaaaacttgccttaccctgcagcaaaaattaaagcaaaaaatggggtgacggagtggtatttggataaagccgcggcaaggctgctctag

SEQ ID NO: 1158 - protein, 232 aa, Haemophilus influenzae
MNYISFPTAQHAVDKIAQEFVIYSQLNHPVHISLSGGSTPKLLFKTLAKSPYAEQINWKNLHFWWGDDRMVPPSDPESNYGEVQKLLFDHIQIPTENIHRIRGENEPHFELKRFEEELSAVIPNGVFDWIILGMGIDGHTASLFPHQTNFDDENLAVIAKHPESGQIRISKTAKLIEQAKRITYLVTGESKADILKEIQTTPAKNLPYPAAKIKAKNGVTEWYLDKAAARLL

SEQ ID NO: 1159 - DNA, 1485 bp, Haemophilus influenzae
atgcaaactgataataattgtatcgtcatttttggcgcgtctggtgacttaactcatcgtaaactcattccagccctttataatctctacaaaatcgggcgtttgagtgaaaatttttccgttcttggtgttgcacgttctgacttgaacgatgaaactttccgcgaaaaaatgcgtgaggcgttaattcataatgaagaaacaacacctgacactttagatgctttctgctctcatctttattaccaagcagtgaatacttcggatgctcaagattacggcaaacttgttccacgtttagacgaacttcacgataaatatcaaacctgtggtaataccctttactatatgtccactccgccaagtctttatggcgtgattcctgagtgtttggctgcacatggtttaaatacggaagaatatggctggaaacgtattatcgttgaaaaaccttttggttacgatgaaaaaacagcgcaagcattagacgtacaaatccaccgtttctttgaagaacaccaaatttatcgtatcgaccattatttaggtaaagaaaccgttcaaaacttgctcgtattacgtttttcaaatggttggtttgaaccgctttggaaccgtaatttcattgattatgtagaaattactggtgcagaatctattggcgtggaagagcgcgggggctattatgatggttctggcgcaatgcgagatatgttccaaaaccatttattacaagtccttgctatggttgcaatggagccgccagcgattattaacgcgaattcaatgcgtgatgaagtggcaaaagtgatgcatagtttgcgtccattaacttcggaggatatggagaataaccttgttttgggtcaatacactgcggctgaaattaacggcaaaatggaaaaaggctatctagaagaaaaaggtgtgcctgcagattctcgtactgaaacctacatctcattgcgttgtgaaattgaaaactggcgttgggctggcgtgccgttctatgttcgtacgggtaaacgcttaccagctcgtgtgactgaaattgtgatccattttaaaaccacgccacatcctgtattcagccaaaatgcaccagagaataaattgattattcgtattcaacctgatgaagcgatttcaatgcgttttggtttgaaaaaaccaggtgcaggttttgaggcgaaagaagtatcaatggatttccgttatgcagatttagcaggcacgcaagtattaaccgcttatgaacgtttattgttggatgcgatgaaaggcgatgcaaccttgtttgctcgtactgatgctgtgcatgctgcatggaaatttgtgcaaccgattttagattacaaagccaatggtggtcgtattcacgaatatgaagctggcacttgggggcctgttgcagctgataaattaatcgcaaaacaaggcaaagtgtggcgtaaaccaagtggattgatgaagaaaaaagtttaa

SEQ ID NO: 1160 - protein, 494 aa, Haemophilus influenzae
MQTDNNCIVIFGASGDLTHRKLIPALYNLYKIGRLSENFSVLGVARSDLNDETFREKMREALIHNEETTPDTLDAFCSHLYYQAVNTSDAQDYGKLVPRLDELHDKYQTCGNTLYYMSTPPSLYGVIPECLAAHGLNTEEYGWKRIIVEKPFGYDEKTAQALDVQIHRFFEEHQIYRIDHYLGKETVQNLLVLRFSNGWFEPLWNRNFIDYVEITGAESIGVEERGGYYDGSGAMRDMFQNHLLQVLAMVAMEPPAIINANSMRDEVAKVMHSLRPLTSEDMENNLVLGQYTAAEINGKMEKGYLEEKGVPADSRTETYISLRCEIENWRWAGVPFYVRTGKRLPARVTEIVIHFKTTPHPVFSQNAPENKLIIRIQPDEAISMRFGLKKPGAGFEAKEVSMDFRYADLAGTQVLTAYERLLLDAMKGDATLFARTDAVHAAWKFVQPILDYKANGGRIHEYEAGTWGPVAADKLIAKQGKVWRKPSGLMKKKV

SEQ ID NO: 1161 - DNA, 810 bp, Haemophilus influenzae
atgctggcgctaaacgaacatttacttaaccaagtattgctgattgcttaccaagcgggtaagcatttgcaacagttttatcaaaaacaggttcatgttgaattgaaagaagacaacacgccagtgacggaagcggatctttttgtgagccaatttttaaccgaaaaattgaccgcacttttccctaatgtccctgttctttcggaagaaaattgccatatttcctttgaagagcgtaaaaattggaaagaatattggttgattgatcctcttgatggcacacaacaatttattaatcgtaccgatcaattttctgtgttgataaccttagttcgtaaaaataaacccgtgttaagtgttattcatgcaccaattttatcgacaacttattatgcaatggataatttcggcgcatttaaaaaacaactggatcaggtaaaaaaactcactaaaaacacgacaaattttgaccgccctttacgaattgcggtaggtgcaaccacttcacaagaaaaagtgcggtcgattttgccgaaggattttccttgtgaatttgttgtggttggttcaagtagcttaaaaagcggtttggtggctgaaggtgcagtagattgttatgttcgtttaggacaaacaggcgaatgggataccgctggcgcagaagtgttgctgagtgaaactcacggtgccatttttgactctcattttgagcctttaacctataaccaacgcgaaacattgattaatccgcattttgttatggtgggcgatcaatcgttcgattggcgttctgtctttcaatttaattga

SEQ ID NO: 1162 - protein, 269 aa, Haemophilus influenzae
MLALNEHLLNQVLLIAYQAGKHLQQFYQKQVHVELKEDNTPVTEADLFVSQFLTEKLTALFPNVPVLSEENCHISFEERKNWKEYWLIDPLDGTQQFINRTDQFSVLITLVRKNKPVLSVIHAPILSTTYYAMDNFGAFKKQLDQVKKLTKNTTNFDRPLRIAVGATTSQEKVRSILPKDFPCEFVVVGSSSLKSGLVAEGAVDCYVRLGQTGEWDTAGAEVLLSETHGAIFDSHFEPLTYNQRETLINPHFVMVGDQSFDWRSVFQFN

SEQ ID NO: 1163 - DNA, 417 bp, Haemophilus influenzae
atgaaatcttacttaaaaatacttatttttttccctctgattttacagatggtcgtcaccgcacttttgatttggttcgatgatgactcaagtggcgttatcgttcctttttctagttatgctctcacagcatttcttcttgccaccattcccgcatttttaaccgcacttttagccgcaaaattccgttacgcacgttataacattgcttcgattgtattagtttcatcgatcatttcatttgtttactgcaatatggcatcttatttttatttgttattgctcggtgaacaagaaacttccttttggggctggttgaccgaagggggattgtccctcgggttaataagcacatgcggaatggttttttatgctctatttgtaatgccttggttgctgccaaaaacaagagaataa

SEQ ID NO: 1164 - protein, 138 aa, Haemophilus influenzae
MKSYLKILIFFPLILQMVVTALLIWFDDDSSGVIVPFSSYALTAFLLATIPAFLTALLAAKFRYARYNIASIVLVSSIISFVYCNMASYFYLLLLGEQETSFWGWLTEGGLSLGLISTCGMVFYALFVMPWLLPKTRE

SEQ ID NO: 1165 - DNA, 1989 bp, Haemophilus influenzae
atgcataacgaaaacttaaaagaattgaccgttcgaggaattattctcggtgcattgattacggtaattttcactgcatccaatgtgtatctcggtctaaaagtgggggtgacatttgcgtcatccattccagcggccgtcatttctatggcagtactcaaatttttcaaagattctagcattcttgaaaataatatggtgcaaactcaagcatcttcagcaggtacgctttcttctgtgatcttcgtcttgcctggtttattaatgatgggctactggcaagattttccattctggcaaacgatgttgatttgtgctgctggtggtacattgggcgtgttattcactattccattacgccgtgcaatggtggtaaatagtaatttaccttatcctgaaggggtagccgctgcagaaattttgaaagcaggtaataatgcagatggcgatagcggcgtgaaagatattgcttacggtggtgttttagcaggattagttgcatttttaactaatggtttacgcgttatggctgatggtgcaagtgcttggattcaaacaggaaaagcggcgttccaattaccaatgggcttttcacttgccttgcttggtgctggttatttaattggtattgtgggcggtatcgcaatgttgatcggtgttattttgacttggggtgtggcagtgccatatttcacaatgtcagaagatattgccgcggatgcaagtttaattgattctgcgatgactgtttggaaaaccaaagtgcgttatattggtgtgggtacaattggcattgctgcgatttggacattgctgattttaatgaaaccaatgattgaagggatggttcattctttccgtatgctgaaaggtgggcaagaggcatcagaacatcgtattgatattgacctttctccaaaaacaatgatttatatcttaattgcgacggttgcgttaattgttatttcattacatcactttattgcggcggcaccaatttcgcctgagctttccattttattagtggtagtttgtactttcttagcggtatttatcggcttctttgtggcagcagcttctggttatatggcaggtttagtgggttcatcttcaagcccaatttctggtatcggaattatttctgttatcgtgatttcattagtattggtgtcaatcggtaacgcctcgggcttatttgaaactgtagatggtcagaaatttttaaccgcacttacattgtttacggcatctatcgtaatcactacagcttgtatttctaatgataatctacaagatttaaaaacgggtttattagttgaagcaacaccttggcgacaacaagttgcattaattatcggctgctttgtcggtgcacttgttatcgcggcagtgttagaaatcttgtatcacgcgtatggtttcagcggtgcgttgccacgcccagatatggatccttcacaagccttatctgcaccacaagcaacgttaatgaccgccatttctcaaggtattttcacaaataaattggaatggacttacatcttaactggtgtgggtttaggtgctgtgttaattacgattgatgcatttttgaaaaaagtcagcaacaaagtctttagcttgccagttattgctgtggggattggtatttacttaccaccatcaattaatacacctgtgattgttggtgcattcctagcgtggattatggctcgccatattgcaaaacttggtaacaaagaagtgtcagctaaagcagaacgtttcggtacgcttttctctgcaggtttaattgtaggcgaaagtttaatgggggtaattttagcattcattattgcggcttctgttaccactggcggttctgaagcaccattatccttaaatcttgaaaactgggatacaattggcgagtggttaggtttaatcgtatttatcgtgggcattgtgatttttgcatctcgcgtattacgtgcgaaaaaatctgattaa

SEQ ID NO: 1166 - protein, 662 aa, Haemophilus influenzae
MHNENLKELTVRGIILGALITVIFTASNVYLGLKVGVTFASSIPAAVISMAVLKFFKDSSILENNMVQTQASSAGTLSSVIFVLPGLLMMGYWQDFPFWQTMLICAAGGTLGVLFTIPLRRAMVVNSNLPYPEGVAAAEILKAGNNADGDSGVKDIAYGGVLAGLVAFLTNGLRVMADGASAWIQTGKAAFQLPMGFSLALLGAGYLIGIVGGIAMLIGVILTWGVAVPYFTMSEDIAADASLIDSAMTVWKTKVRYIGVGTIGIAAIWTLLILMKPMIEGMVHSFRMLKGGQEASEHRIDIDLSPKTMIYILIATVALIVISLHHFIAAAPISPELSILLVVVCTFLAVFIGFFVAAASGYMAGLVGSSSSPISGIGIISVIVISLVLVSIGNASGLFETVDGQKFLTALTLFTASIVITTACISNDNLQDLKTGLLVEATPWRQQVALIIGCFVGALVIAAVLEILYHAYGFSGALPRPDMDPSQALSAPQATLMTAISQGIFTNKLEWTYILTGVGLGAVLITIDAFLKKVSNKVFSLPVIAVGIGIYLPPSINTPVIVGAFLAWIMARHIAKLGNKEVSAKAERFGTLFSAGLIVGESLMGVILAFIIAASVTTGGSEAPLSLNLENWDTIGEWLGLIVFIVGIVIFASRVLRAKKSD

SEQ ID NO: 1167 - DNA, 396 bp, Haemophilus influenzae
atggcagaaaaagaagtcagattagataaatggttgtgggctgcccgattttacaaaacacggagcattgctaaagcgatgattgaaagtggtaaagtgcattacaacaatcaacgtgcgaaagtaagtaaaattgtggaagtgggcgcaatgttaaaacttcgccagggaaacgaagaaaaagaaataaaaattatcgccttaagcgatcaacgccgaggtgcgccagaagcacaattactctatcaagaaaccgaaagtagcgtgaaaaaaagagaagaaatcgcgtgggcaagaaaaaataattccctttcaatgccccatcctgatcgtcgcccaaataaaaaagagcggagagatttattgaaatttaaacaccaagataaatttgaataa

SEQ ID NO: 1168 - protein, 131 aa, Haemophilus influenzae
MAEKEVRLDKWLWAARFYKTRSIAKAMIESGKVHYNNQRAKVSKIVEVGAMLKLRQGNEEKEIKIIALSDQRRGAPEAQLLYQETESSVKKREEIAWARKNNSLSMPHPDRRPNKKERRDLLKFKHQDKFE

SEQ ID NO: 1169 - DNA, 453 bp, Haemophilus influenzae
atgcacaacattgatagtttagatcaaaaaatattacgtgtactcactaaagatgcgagaacaccatacgcagaaatggctaaaaattttggtgttagtccaggaacgattcacgttcgggtcgaaaaaatgcgtcaatcgggcattattaaaggcacaaaagtaattattgatgaacgtaaattaggctatgatgtatgttgttttatcggcattattctaaaaagtgcaaaagattatgaaaaagtgatcaaaaagctagaaagttttgatgaagtagtcgaggcctattatacaacgggcaattactcgattttcttaaaggtgatgacacacacaattgcagaattacattccgttttggcgaccaagattcagttaattgatgaaattcaatccactgaaaccttgatttcaatgcaaaatccaattttgcgagatattaaaccttaa

SEQ ID NO: 1170 - protein, 150 aa, Haemophilus influenzae
MHNIDSLDQKILRVLTKDARTPYAEMAKNFGVSPGTIHVRVEKMRQSGIIKGTKVIIDERKLGYDVCCFIGIILKSAKDYEKVIKKLESFDEVVEAYYTTGNYSIFLKVMTHTIAELHSVLATKIQLIDEIQSTETLISMQNPILRDIKP

SEQ ID NO: 1171 - DNA, 993 bp, Haemophilus influenzae
atgaaaaagacatttattttacaacaacaagaaatcagctttgtgaagaacacttttacccaaaatcttattgagcaacttggcattattgaagtgcaaggcccaattttgagccaagtgggtaacggaatgcaagataacctatcaggcattgaaaaagccgtacaggttaatgtgaaatgtattccaaatgccgtatttgaagttgtgcattctcttgcgaaatggaaacgccatacattagctcgtttcaactttaaagaagacgaaggcttgtttgttcatatgaaagcattgcgtcccgatgaagattctcttgatcccacgcactctgtttatgtagatcaatgggactgggaaaaagtgattcctgaaggtcgtcgtaattttgcatacttaaaagaaacagtaaattctatttatcgtgctattcgtttaacagaattagccgtagaagcacgttttgatattccttccattcttccaaaacagattacctttgtgcatagcgaagatttagtaaaacgctatccagatttaagcagtaaagagcgtgaaaacgcaatttgtaaagaatacggtgcagtattcttaatcgggattggcggcaaactttcagatggcaaacctcatgatggtcgtgcaccagattatgatgactggacaacagaatctgaaaatggctacaaaggtttaaacggcgacattttggtatggaacgaccaattaggcaaagcctttgaactttcctcaatgggtatccgcgtagatgaaagtgcattacgcttacaagttggcttaacaggcgatgaagaccatttaaaaatggattggcaccaagatttattaaacgggaaattgccattaactatcggcggtggtatcggtcaatctcgcttagcgatgcttttacttcgtaaaaaacatatcggtgaagtgcaatcaagcgtatggccaaaagaaatgttagaagaattttcaaacattctttaa

SEQ ID NO: 1172 - protein, 330 aa, Haemophilus influenzae
MKKTFILQQQEISFVKNTFTQNLIEQLGIIEVQGPILSQVGNGMQDNLSGIEKAVQVNVKCIPNAVFEVVHSLAKWKRHTLARFNFKEDEGLFVHMKALRPDEDSLDPTHSVYVDQWDWEKVIPEGRRNFAYLKETVNSIYRAIRLTELAVEARFDIPSILPKQITFVHSEDLVKRYPDLSSKERENAICKEYGAVFLIGIGGKLSDGKPHDGRAPDYDDWTTESENGYKGLNGDILVWNDQLGKAFELSSMGIRVDESALRLQVGLTGDEDHLKMDWHQDLLNGKLPLTIGGGIGQSRLAMLLLRKKHIGEVQSSVWPKEMLEEFSNIL

SEQ ID NO: 1173 - DNA, 675 bp, Haemophilus influenzae
atgaacacacaatttaaacttattggctttgatttagacggcaccttggtaaatagcttgcctgatttagcgttatccgtaaattctgccttggctgaatttaatttaccgcaagcgccagaagaattagttttaacttggatcggcaatggtgcacctgtattaattgctcgagcgttagattgggcgaaaaaacaaacaggaaaagtgctaactgaaacagaggttaagcaagtaacagaacgttttaatttttattatggcgagaatttatgtaatgtcagccgcttgtatccaaatgtaaaagaaactttagaaatcctgaaagaaaaaggctatgtcctagcagttgttaccaataaacccacaaaacatgttcaacctgtgttggcagcatttggcattgatcatttatttagtgaaatgttaggtggccagtctttacctgtcattaaaccacatccaggtccgctttattatttatgcggaaaatttggttttgaaccacgccaagtgcttttcgtaggcgattctaaaaatgatattatcgcaggccacgctgcaggctgtgcagttgttggtttaacttacggctacaattacaatatccctatcactgaatccaatccagattgggtgtttgatgattttgcccagctattaagtattctttaa

SEQ ID NO: 1174 - protein, 224 aa, Haemophilus influenzae
MNTQFKLIGFDLDGTLVNSLPDLALSVNSALAEFNLPQAPEELVLTWIGNGAPVLIARALDWAKKQTGKVLTETEVKQVTERFNFYYGENLCNVSRLYPNVKETLEILKEKGYVLAVVTNKPTKHVQPVLAAFGIDHLFSEMLGGQSLPVIKPHPGPLYYLCGKFGFEPRQVLFVGDSKNDIIAGHAAGCAVVGLTYGYNYNIPITESNPDWVFDDFAQLLSIL

SEQ ID NO: 1175 - DNA, 675 bp, Haemophilus influenzae
atgaaaccttatcttatcgccccatcaattctttctgccgatcttgcacgtcttggcgatgacgtacaaaacgtacttaatgcaggcgcggatgttattcattttgatgttatggataatcattatgtacctaatctcacttttgggcctgcagtatgtcaagctttacgtgattatggcattaccgcaccgattgatgtgcatttaatggtaaaacccgttgatcgtattattcccgattttgctaaagcaggtgcgaactacatcacttttcacccagaatctagcgaacatattgaccgctctttgcagcttattcgcgattgtggttgtaaatctggattagtttttaaccctgcgacgccgttgagctatttagattacgttttagataaagtggatgtggttttattaatgtcagtgaatcccggatttggcggacaatcttttattccagcaacattgaagaaattacaacaggctcgtaagatcattgatgaaagtggttatgacattcgtcttgaagtagatggtggagtgaaggttgataacatcgcagaaattgccgcggcaggtgctgatatgtttgtggcaggttctgcaatttttggtaagccagattataaacaagttattgaccaaatgcgtacacaacttgcgagtgtgggcaaataa

SEQ ID NO: 1176 - protein, 224 aa, Haemophilus influenzae
MKPYLIAPSILSADLARLGDDVQNVLNAGADVIHFDVMDNHYVPNLTFGPAVCQALRDYGITAPIDVHLMVKPVDRIIPDFAKAGANYITFHPESSEHIDRSLQLIRDCGCKSGLVFNPATPLSYLDYVLDKVDVVLLMSVNPGFGGQSFIPATLKKLQQARKIIDESGYDIRLEVDGGVKVDNIAEIAAAGADMFVAGSAIFGKPDYKQVIDQMRTQLASVGK

SEQ ID NO: 1177 - DNA, 2421 bp, Haemophilus influenzae
atgtcagaaacgaccaatgataactatggtgcatcaagcattaaagtattaaaaggccttgatgcggtgcgtaagcgtcctggtatgtatatcggcgataccgatgacggtactggtttgcaccatatggtatttgaagtggtggataatgccattgatgaagccctcgctggccattgttccgatattatcgtgacaattcacgatgataattctgtatcggtgcaagatgatgggcgtggtattcctgtggatattcacccagaagaaggcgtttctgcagcggaagtgattatgactgtgcttcacgcaggtggtaaatttgacgataactcttataaagtatcaggaggtttacacggcgtgggcgtatctgtagtgaatgcgctttctgataagttacaattaaccattcgtcgtcaaggtcacgttcacgagcagttttatcatttaggggagcctcaatcgccattaacagtgattggcgaaacagaggcaacggggacaacggttcgtttctggccaagctcagatatttttgctatcacaacctttgattacaaaatcttagcaaaacgcttacgcgagctttctttcttgaattctggcgtatctattcgtttaatcgataaacgtgatggatctgaagatcatttccattacgaaggcggtattcaagcattcgtagaatatttgaacaaaaataaaaacccaattcatccaaaaccattttattttaccgctgagaaagatggcatcggcgtagaagtcgcattacaatggaatgatggtgtaaatgaaaacgtgtactgctttaccaataacattcctcaacgtgatggcggtactcacttagctggttttcgtggagctttaacccgtagcttaaatagctatatggaaaacgaaggcatgctgaaaaaagaaaaagtggcgacttcaggcgatgatgcacgtgaaggtttggtggcgattatttccgttaaagtgcctgatccaaaattctcatcgcaaacgaaagacaaactcgtgtcttcagaagttaaaagtgcggtggaatcagcgatgaatgaaaaaatgcaggaatatttattagaaaatcctgcagatgcaaaaatcattgtaaatcaaattattatggcagctcgtgcgcgtgaagcagcacgcaaagcgcgtgaaatgacgcgtcgtaaaggggcattagatattgcaggtttaccgggtaaacttgcagactgccaagaaaaagatcctgcactttctgaactttacttggtggagggagactccgctggtggttctgcaaaagttggtcgtgatcgtaaaactcaagcaattttgccattgaaaggtaaaattttaaacgtagaaaaagcacgtttcgacaaaatgttgtcttcccaagaagtgggcacattaattactgctttaggctgcggtattggtcgtgatgaatataatccagataaattacgttatcatcatatcattattatgaccgatgctgatgtggatggttctcacatccgtacgttgcttttaacgtttttctatcgtcaaatgcctgagctgattgagcgtggttatgtttacattgctcagccgccactttacaaagtgaaaaaaggaaaacaagaacgctacattaaagatgcggatgaaatggagcaatatgaattaacccttgcgttagatggcgcagaattacatatcagcgcaaatgcaccagcaatgaatgcccttgtatttgagaaattggtggcagaatataacagcgtacaaaaacttatcggtcgcttaagccgtcattacccagcccctgtattgcaaggattaatttatcagtcgccaatttctattgaaatgatgaaagaggaaagtgcggttgaaaattggggtaaatcttttgttgaacaactgactgcaaaagaaacagaagcacatcaatattcagtacgtacacaatttaatgcggaacgccaagtgtatgaagcggtgattactgttcgcaaacacggtattgataccgattatttcttgaattttgattttgttcacggcaatgaatacgcgaaaattgtttctcttaataaacaactcaatggtttattagaagagggtgcttatgttattcgtggcgaaaaagtacaaccagtgcgtagttttgaacaagccgttgaatggctagtaaaagaatctcgtaaaggccttgaagtacaacgttataaaggacttggggaaatgaatgcagatcaactttgggaaaccacaatggatccaaattcacgtcgtatgttgaaagtttctattaaggatgctgttgcagcagatcaattattcactaccttaatgggagatgaagttgagccacgtcgtgagttcattgagctgaatgcgttaagagcaaatttagacgtgtaa

SEQ ID NO: 1178 - protein, 806 aa, Haemophilus influenzae
MSETTNDNYGASSIKVLKGLDAVRKRPGMYIGDTDDGTGLHHMVFEVVDNAIDEALAGHCSDIIVTIHDDNSVSVQDDGRGIPVDIHPEEGVSAAEVIMTVLHAGGKFDDNSYKVSGGLHGVGVSVVNALSDKLQLTIRRQGHVHEQFYHLGEPQSPLTVIGETEATGTTVRFWPSSDIFAITTFDYKILAKRLRELSFLNSGVSIRLIDKRDGSEDHFHYEGGIQAFVEYLNKNKNPIHPKPFYFTAEKDGIGVEVALQWNDGVNENVYCFTNNIPQRDGGTHLAGFRGALTRSLNSYMENEGMLKKEKVATSGDDAREGLVAIISVKVPDPKFSSQTKDKLVSSEVKSAVESAMNEKMQEYLLENPADAKIIVNQIIMAARAREAARKAREMTRRKGALDIAGLPGKLADCQEKDPALSELYLVEGDSAGGSAKVGRDRKTQAILPLKGKILNVEKARFDKMLSSQEVGTLITALGCGIGRDEYNPDKLRYHHIIIMTDADVDGSHIRTLLLTFFYRQMPELIERGYVYIAQPPLYKVKKGKQERYIKDADEMEQYELTLALDGAELHISANAPAMNALVFEKLVAEYNSVQKLIGRLSRHYPAPVLQGLIYQSPISIEMMKEESAVENWGKSFVEQLTAKETEAHQYSVRTQFNAERQVYEAVITVRKHGIDTDYFLNFDFVHGNEYAKIVSLNKQLNGLLEEGAYVIRGEKVQPVRSFEQAVEWLVKESRKGLEVQRYKGLGEMNADQLWETTMDPNSRRMLKVSIKDAVAADQLFTTLMGDEVEPRREFIELNALRANLDV

SEQ ID NO: 1179 - DNA, 111 bp, Haemophilus influenzae
atggggcgaaattattcgccctttttttatcgttttcctttcccgaaaagcatcgccaaaacggcgattttttgctataatctcgcccaatttttatttacaaaagaatga

SEQ ID NO: 1180 - protein, 36 aa, Haemophilus influenzae
MGRNYSPFFYRFPFPKSIAKTAIFCYNLAQFLFTKE

SEQ ID NO: 1181 - DNA, 2313 bp, Haemophilus influenzae
atgttaaatcaacaaattagccaaattattgcggcagaattaaccgttcaaccccaacaaattcttgctgccattcaattattagatgatggcaacaccattccatttatcgcccgttatcgtaaagaagccacagggggcttagatgacacccaacttcgtcattttgaaacccgtttaatttatttgcgtgaattggaagatcgtcgtcaaactattttgaaatctattgaagagcaaggaaaattgaccgatgaattgcgtgacaaaattcatgcgacacaaagcaaaactgaattagaggatttgtatttgccgtacaaaccaaaacgccgtaccaaaggtcaaattgccattgaagctggtcttgagccattggctgatttactttggagcgagccaaaaaatgatccagaatcaaccgcactttcctttgtggatgctgaaaaaggcgtagctgatagcaaagctgcgttagatggtgctcgctatattttaatggagcgttttgctgaagatgcaggtttattagcgaaagtgcgtgattatttagcaaaaaatgccgttatcgtatcaaaagtgatcgaaggcaaagaaacggaaggctcaaaattccaagattatttcgaccaccaagaattattgaaaaatgtgccttctcaccgggcattggccatgttccgtggacgtaatgagggcattttacaattaagtttaaatgctgatcctgatgcagaagagggaagtagccaaagctattgtgaagagattattcgtgattatttagatgtccgtttcacggggctgccagcggataaatggcgtgagcaagtgattgcgtggacgtggaaaatcaaagtttcgttgcatttagaaacggaattaatggcaagtttacgtgaaaaagcggaagaagaagccattgatgttttcgccagaaatttgaccgcacttttaatggcagcaccggctggcgcgaagagcacaatgggcttggacccaggcttacgtacgggagttaaagttgcagtagtggataacacaggtaaattattagataccactaccatttatccacacacggggcgtgaagccgaagcacaagtggcgattttcagcttaatccgcaaacataacgtggaattaattgctattggtaatggtacagcttctcgtgaaacagaacgttttgcgaaagacgtgattaaagaaattaaagaaaataaaccacaaaccgttgtggtcagtgaagctggtgcgtccgtttattcagcttctgaatttgccgcaaatgaattcccgaatttagatgtatctttacgtggtgcggtatcaattgcgcgtcgtttacaagatccattggcagaattagtgaaaatagaaccgaaatccattggtgttgggcaatatcaacacgatgtaaaccaaactcaacttgcgcgtaaacttgatgcagtagtggaagactgtgtaaacgcagtaggtgtggatttgaatacggcatccgcaccattgctcgctcgcgtggctggaatgacgaaaaccttagcacaaaacattgtggaatatcgtgatgaaaatgggcgttttgaaagccgtgcagaattgaaaaaagtgtcacgtttagggcctaaagcctttgagcaatgtgcaggctttatgcgtattgctgaagggaaaaatccacttgatgcttcaggtgttcacccagaagcttaccctgtggtcgaaaaaattttgcaagctaccgcacaatctattcaagatttaatgggtaatgcaggtgtggtacgtcagcttgatgcaaaacaattcattgatgaacaatttggtttaccgaccgtccaagatattttcaaagagttagaaaaaccagggcgcgatccgcgtggcgagttcaaaaccgctgtatttgctgagggcgtggaagaaataacggatttaaaatctggaatgattttagaaggaacagtgactaatgtaactaattttggcgcatttgtggatattggtgttcatcaagatggtttagtacatatttcatcattaagcgataaattcgtggaagatccccatcaagtggtaaaaacaggcaacattgtaaaagtcaaagtgttagaagtggatgtgccacgtaaacgcattgcattgacgatgcgattagatgaaagtgcggtcaaaaatgacagtaaatctgaccgcactttatcagcaagacctcgtgcaaatacgcagcgagaagagcgtagttcaagaggtaataatgcgatgggcaatgcctttgctgatgcgctaaaaaattggaaaaaataa

SEQ ID NO: 1182 - protein, 770 aa, Haemophilus influenzae
MLNQQISQIIAAELTVQPQQILAAIQLLDDGNTIPFIARYRKEATGGLDDTQLRHFETRLIYLRELEDRRQTILKSIEEQGKLTDELRDKIHATQSKTELEDLYLPYKPKRRTKGQIAIEAGLEPLADLLWSEPKNDPESTALSFVDAEKGVADSKAALDGARYILMERFAEDAGLLAKVRDYLAKNAVIVSKVIEGKETEGSKFQDYFDHQELLKNVPSHRALAMFRGRNEGILQLSLNADPDAEEGSSQSYCEEIIRDYLDVRFTGLPADKWREQVIAWTWKIKVSLHLETELMASLREKAEEEAIDVFARNLTALLMAAPAGAKSTMGLDPGLRTGVKVAVVDNTGKLLDTTTIYPHTGREAEAQVAIFSLIRKHNVELIAIGNGTASRETERFAKDVIKEIKENKPQTVVVSEAGASVYSASEFAANEFPNLDVSLRGAVSIARRLQDPLAELVKIEPKSIGVGQYQHDVNQTQLARKLDAVVEDCVNAVGVDLNTASAPLLARVAGMTKTLAQNIVEYRDENGRFESRAELKKVSRLGPKAFEQCAGFMRIAEGKNPLDASGVHPEAYPVVEKILQATAQSIQDLMGNAGVVRQLDAKQFIDEQFGLPTVQDIFKELEKPGRDPRGEFKTAVFAEGVEEITDLKSGMILEGTVTNVTNFGAFVDIGVHQDGLVHISSLSDKFVEDPHQVVKTGNIVKVKVLEVDVPRKRIALTMRLDESAVKNDSKSDRTLSARPRANTQREERSSRGNNAMGNAFADALKNWKK

SEQ ID NO: 1183 - DNA, 489 bp, Haemophilus influenzae
atggcaaaatcaaattatattacccgtcaaggctggcttgcgcttgaccaagaactcaagtttttatggaaagaagaacgcccaaaagtcactcaagccgtttcagatgcagctgcactaggcgatcgtagcgaaaatgccgaatatatttatggtaaacgccgcttacgtgaaattgatcgccgcgtgcgttttttaactaaaagattggaagtgctacaaattgtcgattacaacccaaagcaagagggaaaagttttcttcggtgcgtgggtggaattagaaaatgaagaaggtgaaattaagcaatatcgtatcgtcggttgcgatgaatttgcccctgcgaaaaattggatatccattgattccccagttgctcgagctttaatcggaaaaacattagacgacgaagtgcgggtagaaacgccatcaggttttatcacactttatgtgaataaaatttggtatgagaataactcggaaaaataa

SEQ ID NO: 1184 - protein, 162 aa, Haemophilus influenzae
MAKSNYITRQGWLALDQELKFLWKEERPKVTQAVSDAAALGDRSENAEYIYGKRRLREIDRRVRFLTKRLEVLQIVDYNPKQEGKVFFGAWVELENEEGEIKQYRIVGCDEFAPAKNWISIDSPVARALIGKTLDDEVRVETPSGFITLYVNKIWYENNSEK

SEQ ID NO: 1185 - DNA, 618 bp, Haemophilus influenzae
atggctggtgttcgtgctgttcaaaaagaaaagacgcgtcgagctttagtggatgcggcatttaatcaacttagcgcagaaaaaagtttttctaatttaagtttacgagaagtggcgcgcgaggctggtattgcgcctacctctttctatcgccattttagtgatatggatgaacttggcttagaaatggtggatgaagcaggtttgatgttgcgccaattaatgcgtcaagcgcgtaaacgcattgatgcgggcggtagtgttatttctgtttctgtggatacattttttgaatttattactaatagcacgaacgtttttcgcttgctattacgcgaaagttcaggcacttctcaagcttttcgtactgcggcagcacgcgaaattaagcattttgttgatgagttagcagaatatatttcctacaaacatcaatattcgcaatatgttgcttatgttcaagcggaaggcatcgtaacaatcgtattcactgcaggggcgaatgctttagatatgagtaaagctgagcgtgagcaacttaaagctcgtgtgattttgcagttgagaatgcttgcaaaaggtgctgattttgcagcgaataaggaaagaggcaagtaa

SEQ ID NO: 1186 - protein, 205 aa, Haemophilus influenzae
MAGVRAVQKEKTRRALVDAAFNQLSAEKSFSNLSLREVAREAGIAPTSFYRHFSDMDELGLEMVDEAGLMLRQLMRQARKRIDAGGSVISVSVDTFFEFITNSTNVFRLLLRESSGTSQAFRTAAAREIKHFVDELAEYISYKHQYSQYVAYVQAEGIVTIVFTAGANALDMSKAEREQLKARVILQLRMLAKGADFAANKERGK

SEQ ID NO: 1187 - DNA, 906 bp, Haemophilus influenzae
atgaatatccgtgatctagaatatcttgttgccttatctgaatataaacatttccgccgtgctgccgattcttgtaatgtgagtcaaccaacattaagtggtcaaattcgtaaattagaagatgagctcggtattatcttgttagagcgcactagccgtaaagtgttgtttactcaatctgggatgttattggttgatcaggctcgtacagttcttcgagaagtaaaattattgaaagaaatggcgagtaatcaaggtaaagaaatgaccgggccattacacatcggtttaattccaacggttggtccttatttgctcccttatattgtgccaatgttaaaagcggcattccctgatttagaagtgtttctttatgaagcgcaaacgcatcaattattagaacaattggaaacggggcgtttagattgtgctatcgttgccactgttccagaaactgaggcttttattgaagtacctattttcaacgagaaaatgttactcgccgtatcagagcatcatccttgggctcaagaaagtaaacttccaatgaaccaattagatggtcaagaaatgttaatgcttgatgatggtcattgtttgcgcaaccaagcgctagattattgcttcactgctggtgcaaaagaaaattcccatttccaagcaactagtcttgaaactttgcgcaatatggtggcagccaatgctggtatcacttttatgcctgaattggcagtactgaatgaaggtacgcgcaaaggtgtgaaatatattccttgttattcgcctgagccatcacgcaccattgcgttggtttatcgtcctggttcgccattacgtaatcgttatgagcgtgtggcaagtgcggtcagcgatgaagttaaatctattctaggtgggttgaaataa

SEQ ID NO: 1188 - protein, 301 aa, Haemophilus influenzae
MNIRDLEYLVALSEYKHFRRAADSCNVSQPTLSGQIRKLEDELGIILLERTSRKVLFTQSGMLLVDQARTVLREVKLLKEMASNQGKEMTGPLHIGLIPTVGPYLLPYIVPMLKAAFPDLEVFLYEAQTHQLLEQLETGRLDCAIVATVPETEAFIEVPIFNEKMLLAVSEHHPWAQESKLPMNQLDGQEMLMLDDGHCLRNQALDYCFTAGAKENSHFQATSLETLRNMVAANAGITFMPELAVLNEGTRKGVKYIPCYSPEPSRTIALVYRPGSPLRNRYERVASAVSDEVKSILGGLK

SEQ ID NO: 1189 - DNA, 726 bp, Haemophilus influenzae
atgtctagtatggaaggaaaaaaagtccctcaagtgacattccgcactcgtcagggtgataaatgggttgatgtaactacctcagagttatttgataacaaaacagtgatcgtgttctcattaccgggcgcattcactccaacttgctcatcatcacacttaccacgttacaacgaattagcgccagtattcaaaaaatacggtgtagacgatattcttgttgtatctgtaaatgatactttcgtaatgaatgcatggaaagaagatgaaaaatctgaaaacatcactttcattccagatggtaatggtgaatttaccgaaggcatgggtatgttagttggtaaagaagatttaggcttcggtaaacgttcatggcgttattctatgcttgtgaaaaacggtgtagttgaaaaaatgtttatcgaaccaaacgaaccaggcgatccgttcaaagtatccgatgctgacactatgttgaaataccttgcaccacaacaccaagtgcaagagtctatttcaatcttcacaaaacctggctgtcctttctgtgcaaaagcaaaacaacttttacacgataaaggcttaagctttgaagaaatcatattaggtcacgatgcaacaatcgtgagcgtacgtgcagtttcaggtcgtactactgttccacaagtgtttatcggtggtaaacacattggcggtagcgacgatttggaaaaatactttgcataa

SEQ ID NO: 1190 - protein, 241 aa, Haemophilus influenzae
MSSMEGKKVPQVTFRTRQGDKWVDVTTSELFDNKTVIVFSLPGAFTPTCSSSHLPRYNELAPVFKKYGVDDILVVSVNDTFVMNAWKEDEKSENITFIPDGNGEFTEGMGMLVGKEDLGFGKRSWRYSMLVKNGVVEKMFIEPNEPGDPFKVSDADTMLKYLAPQHQVQESISIFTKPGCPFCAKAKQLLHDKGLSFEEIILGHDATIVSVRAVSGRTTVPQVFIGGKHIGGSDDLEKYFA

SEQ ID NO: 1191 - DNA, 222 bp, Haemophilus influenzae
atgcaaattcaacaaatgttagaaaatcgcatcgaagaacttgaaatgaaaattgcatttcaggaacagttattagatgaattaaatcacgctttagttcaacagcaatttgatattgataaaatgcaagtccaattgcgttatatggcaaataaattaaaagactttcaaccctctaacattgcaagtcaatctgaagaaacgccaccgccccattattga

SEQ ID NO: 1192 - protein, 73 aa, Haemophilus influenzae
MQIQQMLENRIEELEMKIAFQEQLLDELNHALVQQQFDIDKMQVQLRYMANKLKDFQPSNIASQSEETPPPHY

SEQ ID NO: 1193 - DNA, 726 bp, Haemophilus influenzae
atgttaaaaattcaaaaattatctattgcagcattaatggtaagtgcggtgatttctggccaagtttttgcagaagatagcgcattcgatgaaaaagcggcatcttatgcagtaggtgcgttaatgggcagtcaaatgaaagatcttgttgattcccacaaagaagttattaaatatgataatgcgcgtattttagatggcttaaaagatgctttagaaggcaaagtggatgttcgtaaagatgaaaaaatccaaaaaaccttagaatctattgaagcaaaattagtggctgcatcaaaagcaaaagcagaatcgattgctaaacaagcaaaagaagaaggcgataaattccgtgctgaatttgccaaagggaaagatgtaaaaacgacgcaatctggtttaatgtataaaattgaaagtgcaggtaaaggcgatacaatcaaatcaacggatacggttaaagtacattacacgggtaaattaccaaatggaaaagtatttgatagctctgtcgagcgcggacaacctgtagaattccaacttgatcaagtgattaaaggctggactgaaggtcttcaattagtgaaaaaaggcggaaaaattcaattagtcatagccccagaattaggctatggcgaacaaggtgctggtgcatctattccaccaaattcaacattaatttttgatgtggaagtattagacgtcaatccgaaatctgaaaaataa

SEQ ID NO: 1194 - protein, 241 aa, Haemophilus influenzae
MLKIQKLSIAALMVSAVISGQVFAEDSAFDEKAASYAVGALMGSQMKDLVDSHKEVIKYDNARILDGLKDALEGKVDVRKDEKIQKTLESIEAKLVAASKAKAESIAKQAKEEGDKFRAEFAKGKDVKTTQSGLMYKIESAGKGDTIKSTDTVKVHYTGKLPNGKVFDSSVERGQPVEFQLDQVIKGWTEGLQLVKKGGKIQLVIAPELGYGEQGAGASIPPNSTLIFDVEVLDVNPKSEK

SEQ ID NO: 1195 - DNA, 666 bp, Haemophilus influenzae
atgacattaaacgataaatatcctttcactgatgaagatcaggctatcataaattcctacaaagcagtcgttgatggtgtcagcgcactgattggcgagcactgcgaaatcgtgcttcattctctggaaaatattgaacattctgctatttgtattgccaacggacataacactaatcgacaagttggttcgccaattactgatcttgccttacgttcgctccgaaatatgcaaagcgaaagtgtttcaaagccttattttacacgagcaaaaggcagcgtactgatgaaatcagttactatcgctattcgtaataaaactcaacgtattattggtttgctttgcatcaatatcaatttagatgtacccatgtctcaatttttgcaatgctttatgccaactgagcatacgaatgaaacatcttcagtgaactttgcgaattcagtggaagacttggttgcgcagactattgaaaaaacaatagaagaagtcaatgcggatcgctctgttgccaataatactaaaaaccgacaaattgtcctttctctttacgaaaaaggtatttttgatattaaagatgcgattaatttagtcgcagaacgcttagatatttcccgacatacggtttacctgtacatccgccaaatcaaacaagagcaagaataa

SEQ ID NO: 1196 - protein, 221 aa, Haemophilus influenzae
MTLNDKYPFTDEDQAIINSYKAVVDGVSALIGEHCEIVLHSLENIEHSAICIANGHNTNRQVGSPITDLALRSLRNMQSESVSKPYFTRAKGSVLMKSVTIAIRNKTQRIIGLLCININLDVPMSQFLQCFMPTEHTNETSSVNFANSVEDLVAQTIEKTIEEVNADRSVANNTKNRQIVLSLYEKGIFDIKDAINLVAERLDISRHTVYLYIRQIKQEQE

SEQ ID NO: 1197 - DNA, 381 bp, Haemophilus influenzae
atgcgctatgttatcgccgtcaaaagccctatttacggaaaacaaggggcatttttagcttatcaatttgcagatgccttaatcaaaaaaggacacgaaatctcacagatttttttcttccaagatggagtgagtaacggaaatgcattagtgtatccagccaatgatgaagttaatttacaaaaacattggcaaatgttttctattacctacaatattcctttacatttatgtgttgcagcatctcaaagacgaggtgttgttgataacttaactacaccaactacagctcactacaatcttgcagagggattcacaattgcaggtcttggagaatttatagcagcaagtttaaacgcagatcgagtaataaccctatga

SEQ ID NO: 1198 - protein, 126 aa, Haemophilus influenzae
MRYVIAVKSPIYGKQGAFLAYQFADALIKKGHEISQIFFFQDGVSNGNALVYPANDEVNLQKHWQMFSITYNIPLHLCVAASQRRGVVDNLTTPTTAHYNLAEGFTIAGLGEFIAASLNADRVITL

SEQ ID NO: 1199 - DNA, 360 bp, Haemophilus influenzae
atgaagatagcctttttatttcgcacatctccacatggcacatccatttcacgagaaggcttagatgcaattcttgccgcgacagctttttgtgaacccaatgatattgggatattttttatcgatgatggcgtattaaatcttatcgataaccaacaacccgaaatcattcaacaaaaagatttcattagaacctttaaattattagatttatatgatgtagaacaacgctttatctgcacagcgtctttgcagaaatttaaattagataatagagaacttatcctatcttgtgaaaaaattgaccgctctttattgctagaaaagcttaatcaagcagaaaaattgtttactttctaa

SEQ ID NO: 1200 - protein, 119 aa, Haemophilus influenzae
MKIAFLFRTSPHGTSISREGLDAILAATAFCEPNDIGIFFIDDGVLNLIDNQQPEIIQQKDFIRTFKLLDLYDVEQRFICTASLQKFKLDNRELILSCEKIDRSLLLEKLNQAEKLFTF

SEQ ID NO: 1201 - DNA, 288 bp, Haemophilus influenzae
atgctttatacattttctcaatcagattatcccaaaactgaactcgatgactatttttcatatattacagaaaaagatgcggtagtactatggcaagacggtgtgttattggcaataaaatatcctgattattttgccaaatgtaaagggaattgcatgatattaaaacaagatattttagcaagaaatctcaccgcacttttacctcaaagcagcaagataaaattaatatcaatagaagaacttgttggaatcactgaaaattatttaccacagctatcactataa

SEQ ID NO: 1202 - protein, 95 aa, Haemophilus influenzae
MLYTFSQSDYPKTELDDYFSYITEKDAVVLWQDGVLLAIKYPDYFAKCKGNCMILKQDILARNLTALLPQSSKIKLISIEELVGITENYLPQLSL

SEQ ID NO: 1203 - DNA, 1185 bp, Haemophilus influenzae
atgtctaaagaaaaatttgaacgtacaaaaccgcacgtaaacgtgggtacaatcggccacgttgaccacggtaaaacaactttaacagcagcaatcacaaccgtattagcaaaacactacggtggtgcagcgcgtgcatttgaccaaattgataacgcgccagaagaaaaagcgcgtggtattaccatcaacacttcacacgttgaatacgatacaccgactcgccactacgcacacgtagactgtccgggacacgccgactatgttaaaaatatgattactggtgcggcacaaatggatggtgctattttagtcgtagcagcaacagatggtcctatgccacaaactcgtgagcacatcttattaggtcgccaagtaggtgttccatacatcatcgtattcttaaacaaatgcgacatggtagatgacgaagagttattagaattagtagaaatggaagttcgtgaacttctatctcaatatgacttcccaggtgacgatacaccaatcgtacgtggttcagcattacaagcgttaaacggcgtagcagaatgggaagaaaaaatccttgagttagcaaaccatttagatacttacatcccagaaccagaacgtgcgattgaccaaccgttccttcttccaatcgaagatgtattctcaatctcaggtcgtggtactgtagtaacaggtcgtgtagaacgtggtatcatccgtacaggtgatgaagtagaaatcgtcggtatcaaagatacagcgaaaactactgtaactggtgttgaaatgttccgtaaattacttgacgaaggtcgtgcaggtgaaaacatcggtgcattattacgtggaaccaaacgtgaagaaatcgaacgtggtcaagtattagcgaaaccaggttcaatcacaccacacactgacttcgaatcagaagtgtacgtattatcaaaagatgaaggtggtcgtcatactccattcttcaaaggttaccgtccacaattctatttccgtacaacagacgtgactggtactattgaattaccagaaggcgtggaaatggtaatgccaggggataacatcaagatgacagtaagcttaatccacccaatcgcgatggatcaaggtttacgtttcgcaatccgtgaaggtggccgtacagtaggtgcaggcgttgttgcgaaaatcatcaaataa

SEQ ID NO: 1204 - protein, 394 aa, Haemophilus influenzae
MSKEKFERTKPHVNVGTIGHVDHGKTTLTAAITTVLAKHYGGAARAFDQIDNAPEEKARGITINTSHVEYDTPTRHYAHVDCPGHADYVKNMITGAAQMDGAILVVAATDGPMPQTREHILLGRQVGVPYIIVFLNKCDMVDDEELLELVEMEVRELLSQYDFPGDDTPIVRGSALQALNGVAEWEEKILELANHLDTYIPEPERAIDQPFLLPIEDVFSISGRGTVVTGRVERGIIRTGDEVEIVGIKDTAKTTVTGVEMFRKLLDEGRAGENIGALLRGTKREEIERGQVLAKPGSITPHTDFESEVYVLSKDEGGRHTPFFKGYRPQFYFRTTDVTGTIELPEGVEMVMPGDNIKMTVSLIHPIAMDQGLRFAIREGGRTVGAGVVAKIIK

SEQ ID NO: 1205 - DNA, 2103 bp, Haemophilus influenzae
atggctcgtacaacccctattgaaagatatcgtaatatcggtatcagtgcgcatattgatgcgggtaaaactactactactgagcgtatcttattctatactggtgttagccacaaaatcggtgaagtgcacgatggtgcagcaacgatggactggatggaacaagaacaagagcgtggtatcaccattacctctgcggcaacaactgcattctggtctggtatgtcacaacaattcccacaacatcgtatcaatgttattgatactccgggacacgtggactttactgttgaagtagaacgttctatgcgtgttcttgatggtgcggtaatggtttactgtgcggttggtggtgttcaaccacaatctgaaaccgtatggcgtcaagctaacaaatatgaagttccgcgtattgcgttcgtaaacaaaatggaccgtactggtgctaacttcttacgtgttgttgaacaattaaaaactcgcttaggtgctaatgctattcctcttcaacttcctgttggtgcagaagaaaacttcacaggtgtagttgatttgatcaaaatgaaagcgatcaattggaatgaagcagaccaaggtatgactttcacttatgaagaagtgcctgctaatatgcaagcagactgtgaagaatggcgtcaaaatcttgttgaagcggcagctgaagcgtcagaagaattaatggaaaaatacttaggtggcgaagacttaactgaagaagaaattaagtcagcattacgtcagcgtgtattagcaaatgaaattattttggtaacctgtggttctgcgttcaaaaacaaaggtgttcaagcaatgcttgatgcagttgttgaatacctaccagcaccaactgatattcctgctattaaaggtatcaatccagatgaaactgaaggtgagcgtcacgcaagtgatgaagaaccattctcttcattagcatttaaaattgcaactgacccattcgtaggtaacttaacattcttccgtgtatattctggagtgattaattctggagatacagtattgaattctgtacgtcaaaaacgtgaacgttttggtcgtatcgtacagatgcacgctaataaacgtgaagaaattaaagaagttcgtgcaggtgacatcgcagctgctatcggattaaaagatgtaactactggtgatacattatgtgcaattgatgcgccaattatccttgagcgtatggaattcccagagccagtaatctctgttgcggtagaaccaaaaactaaagctgaccaagaaaaaatgggcttagcattaggtcgtttagcacaagaagacccttcattccgtgttcacacagatgaggaatctggtgaaaccattatttctggtatgggtgagttgcacttagatatcattgttgatcgtatgaaacgtgagttcaaagtggaagctaatattggtaaaccacaagtatcataccgtgaaactatccgcactcgtgttaatgatgtcgaaggtaaacacgctaaacaatctggtggtcgcggtcaatatggtcatgttcttatcgacttatacccattagatccagaaggtcctggttatgaatttgtaaacgaaatcaaaggtggtgtaattcctggtgaatacattccagccgttgataaaggtattcaagaacaacttaaatctggtccattagctggttacccagtagttgatcttggtgtacgtttacacttcggttcataccatgatgtggattcatctgagttagcatttaaacttgctgcgtctttagcatttaaagcagcattctcaaaagcaaacccagtattacttgagccaattatgaaagttgaagttgaaactccacctgaatatgttggtgatgtaattggtgatttaagccgtcgtcgtgctatggtaaacggtcaagaagcgaacgagtttgttgttaagatcgatgctgaagttccactttcagaaatgttcggttatgcaacagacttacgttcacaaactcaaggtcgtgcatcatactcaatggaaccgttaaaatatgctgaagctccaacaagtgtggcagctgcagtaattgaagcgcgtaaaaaataa

SEQ ID NO: 1206 - protein, 700 aa, Haemophilus influenzae
MARTTPIERYRNIGISAHIDAGKTTTTERILFYTGVSHKIGEVHDGAATMDWMEQEQERGITITSAATTAFWSGMSQQFPQHRINVIDTPGHVDFTVEVERSMRVLDGAVMVYCAVGGVQPQSETVWRQANKYEVPRIAFVNKMDRTGANFLRVVEQLKTRLGANAIPLQLPVGAEENFTGVVDLIKMKAINWNEADQGMTFTYEEVPANMQADCEEWRQNLVEAAAEASEELMEKYLGGEDLTEEEIKSALRQRVLANEIILVTCGSAFKNKGVQAMLDAVVEYLPAPTDIPAIKGINPDETEGERHASDEEPFSSLAFKIATDPFVGNLTFFRVYSGVINSGDTVLNSVRQKRERFGRIVQMHANKREEIKEVRAGDIAAAIGLKDVTTGDTLCAIDAPIILERMEFPEPVISVAVEPKTKADQEKMGLALGRLAQEDPSFRVHTDEESGETIISGMGELHLDIIVDRMKREFKVEANIGKPQVSYRETIRTRVNDVEGKHAKQSGGRGQYGHVLIDLYPLDPEGPGYEFVNEIKGGVIPGEYIPAVDKGIQEQLKSGPLAGYPVVDLGVRLHFGSYHDVDSSELAFKLAASLAFKAAFSKANPVLLEPIMKVEVETPPEYVGDVIGDLSRRRAMVNGQEANEFVVKIDAEVPLSEMFGYATDLRSQTQGRASYSMEPLKYAEAPTSVAAAVIEARKK

SEQ ID NO: 1207 - DNA, 471 bp, Haemophilus influenzae
atgccacgtcgtcgtagtgttgaagcacgcaagattcttccagatccgaagttcggttcagaattacttgcaaaatttattaatgtaatcatggtagacggtaaaaaatccgttgctgaatcaatcgtttatggtgctttagaaactttagcacaacgcacaggtaaagagcctttagaagcgtttgaagttgcacttgaaaacgtacgtccaactgttgaggttaaatctcgtcgtgttggtggttctacttaccaagtaccagttgaagtgcgccctgtacgtcgtaacgcattaggtatgcgttggatcgttgaagcagcacgtaaacgtggtgataaatcaatggctttacgccttgcaaacgaattatctgatgcttcagataataaaggtgcagcagtgaaaaaacgtgaagatgttcaccgtatggctgaagctaataaagcatttgctcactaccgttggtaa

SEQ ID NO: 1208 - protein, 156 aa, Haemophilus influenzae
MPRRRSVEARKILPDPKFGSELLAKFINVIMVDGKKSVAESIVYGALETLAQRTGKEPLEAFEVALENVRPTVEVKSRRVGGSTYQVPVEVRPVRRNALGMRWIVEAARKRGDKSMALRLANELSDASDNKGAAVKKREDVHRMAEANKAFAHYRW

SEQ ID NO: 1209 - DNA, 375 bp, Haemophilus influenzae
atggcaactatcaaccagctagtacgcaaaccgcgtgtgaaaaaggttgtaaaaagcaacgttcctgcattagaggcttgcccgcagaaacgtggtgtatgtactcgtgtatatactacaactcctaaaaaaccaaactcagcgttacgtaaagtatgtcgtatccgcttaactaacggttttgaagtaacttcttatatcggtggtgaaggtcacaaccttcaagagcacagtgttgtattaatccgtggtggtcgtgttaaagacttaccaggtgtgcgttaccacacagtacgcggtgcattagactgcgcaggcgttaaagatcgtaaacaaggtcgttctaaatacggcgttaaacgtcctaaagcttaa

SEQ ID NO: 1210 - protein, 124 aa, Haemophilus influenzae
MATINQLVRKPRVKKVVKSNVPALEACPQKRGVCTRVYTTTPKKPNSALRKVCRIRLTNGFEVTSYIGGEGHNLQEHSVVLIRGGRVKDLPGVRYHTVRGALDCAGVKDRKQGRSKYGVKRPKA

SEQ ID NO: 1211 - DNA, 1890 bp, Haemophilus influenzae
atgttttacactgaaacttatgatgtgattgtgatcggtggtggccatgcgggtacagaagccgcgcttgcaccagctcgtatgggatttaaaacccttttattaacacataatgtagatactttggggcaaatgtcttgtaaccctgcaattggtgggatcggtaaaggtcatttagtaaaagaagtagatgcaatgggcggtttaatggcgcatgctgcagataaagcagggatccaatttcgtactttaaatagcagtaaaggcccagcagtgcgtgcaactcgtgctcaagctgacagagttctatatcgccaagctgttcgtactgcattagaaaatcaacctaatttagatattttccaacaagaagcgactgatattctgattgagcaagatcgagttacaggcgttagcacaaaaatgggattaacttttcgtgctaaatcagtgatattaactgcaggtactttcttagctggtaaaattcatattggtttggaaaattatgaaggtggccgtgcaggggatcctgcttctgtaaatctttcacatcgattaagagatcttggattacgtgtagatcgccttaaaacaggtacaccaccacgtattgatgcacgtacgatcaattttgatattttagctaaacaacatggtgatgctgttttacctgtgttttcttttatgggatcagttgatgatcacccccaacaaattccttgctatatcacccataccaatgaacaaacccatgaagtgatccgtaataacttggatcgcagtccaatgtatactggtgtgattgaagggatcggtccgcgttattgcccatctattgaagataaagtgatgcgtttctcggatcgtaattcacatcaaatttatttagaaccagaaggcttaaccagtaatgaggtgtatccaaacgggatctctaccagtttaccgtttgacgtgcaaatgggcattgtgaattctatgaaaggtttggaaaaagcgcgcattattaaaccaggttatgcgattgaatatgattattttgatccacgtgacttaaaaccaacgttagaaactaaatcgatttcgggtttattctttgcaggtcaaattaacggtacaaccggttatgaagaagctgcggcacaaggtttattggctgggattaacgcaggtctttatgttcaagagaaggatgcatggtatccacgccgtgatcaatcttatactggtgtattggtggatgacctttgcacgcttggtaccaaagaaccgtatcgcgtatttacttctcgtgctgaataccgtttgttactacgtgaagacaatgcggacattcgtttaacaccaattgcccatgaactaggtttgattgatgatgctcgctgggcacgtttcaatcaaaaaatggaaaatattgaacaggaacgccaacgcttacgcaacatttggttgcatccgcgttctgaatatttagaagaagcgaataaagtgcttggtagtccacttgtacgtgaggctagcggtgaagatttattgcgtcgtcctgaaatgacctacgatattttgacttctttaacgccatataaaccagcaatggaagatagagaagccgtagaacaagtggaaatagctattaaatatcaaggctatatcgagcatcaacaagaagaaatcgaaaaacaaaaacgccacgaaaatacggctatcccagctaactttgattatagcaaagtgtctggtttatctaatgaagtacgtgcgaaattggaacagcatcgtccggtttccattggtcaagcgagccgaatttcaggtatcacccctgctgctatttcaattattctggttaatttgaaaaaacaaggcatgcttaaacgtggggaataa

SEQ ID NO: 1212 - protein, 629 aa, Haemophilus influenzae
MFYTETYDVIVIGGGHAGTEAALAPARMGFKTLLLTHNVDTLGQMSCNPAIGGIGKGHLVKEVDAMGGLMAHAADKAGIQFRTLNSSKGPAVRATRAQADRVLYRQAVRTALENQPNLDIFQQEATDILIEQDRVTGVSTKMGLTFRAKSVILTAGTFLAGKIHIGLENYEGGRAGDPASVNLSHRLRDLGLRVDRLKTGTPPRIDARTINFDILAKQHGDAVLPVFSFMGSVDDHPQQIPCYITHTNEQTHEVIRNNLDRSPMYTGVIEGIGPRYCPSIEDKVMRFSDRNSHQIYLEPEGLTSNEVYPNGISTSLPFDVQMGIVNSMKGLEKARIIKPGYAIEYDYFDPRDLKPTLETKSISGLFFAGQINGTTGYEEAAAQGLLAGINAGLYVQEKDAWYPRRDQSYTGVLVDDLCTLGTKEPYRVFTSRAEYRLLLREDNADIRLTPIAHELGLIDDARWARFNQKMENIEQERQRLRNIWLHPRSEYLEEANKVLGSPLVREASGEDLLRRPEMTYDILTSLTPYKPAMEDREAVEQVEIAIKYQGYIEHQQEEIEKQKRHENTAIPANFDYSKVSGLSNEVRAKLEQHRPVSIGQASRISGITPAAISIILVNLKKQGMLKRGE

SEQ ID NO: 1213 - DNA, 1974 bp, Haemophilus influenzae
atgatgaacagacgtcattttattcaaattggtgcgaccagtattcttgcattaagtgcaaaccgttttgcgatggcaaaaggaaagagcgatgttgaactacgcattgtggcaacaacagatgttcatagtttcttgaccgattttgactattataaagatgcaccaaccgataaattcggttttactcgtgcggcaagccttattcgtcaagcacgtgctgaagtaaaaaatagcgtattggtagataatggggatttaattcaaggtaatccaattgcagactatcaagccgcacaaggctataaagaaggcaaatctaaccctgcggtcgattgtttaaatgcgatgaattatgaagtgggtacattaggtaaccacgaatttaactatggcctcaattatcttgctgatgccatcaaacaagctaaattcccaattgtgaatgcgaacgtagtaaaagcgggaacagaagaaccttatttcacaccttatgtcattcaagaaaaatcagttgttgataatcaaggcaaaacacataaattaaaaatcggttatatcggttttgtgccaccgcaaattatggtttgggataaagcgaaccttcaaggcaaagttgaaacccgtgatattgtaaaaacagcacaaaaatatgtacctgaaatgaagaaaaaaggggctgatattgtcgttgcattagctcacactggtccatctgatgaaccttatcaagaaggtgctgaaaactcagcattctatctagcggatgttccacacattgatgcggttatttttggtcactcacaccgtttattcccaaataaagaatttgcgaaatcaccaaatgcagacatcgtaaatggtaccgtaaaaggcgtaccagaaagtatggctggttactgggcaaataatatcagcgtggtggatttaggcttaacagaacacaagggtaaatggatcgtgacttctggcaaagctgtgcttcgtccaatttatgatgtagaaaccaaaaaagcacttgcaaaaaatgacccagaaattaccgcacttttaaaaccagttcacgaagcgacacgtaaatatgtttctcaacctatcggcaaagcaacagataatatgtacagctatcttgcattagtacaagatgatccaaccattcaaattgtaaaccaagcacaaaaagcgtatgtagagaaagttgcaccaagtgttgcagcaatggctggcttacctattttaagtgcaggcgcaccatttaaagcgggtggtcgtaaaaatgacccaacaggctataccgaagtaaataaaggtgaattaactttccgtaatgcagcagacttatacctttatccaaatacgctagtggttgttaaagcgacaggcgagcaattaaaagaatggttagaatgtagtgctggtatgtttaaacaaattgaccctacaagtgataaaccacaatcattaatcgactgggaaggtttccgcacttataactttgatgtgattgatggtgtcaattatgaatacgatctaaccaaacctgctcgttacgatggcgaatgtaagttaatcaacccagaatcgcatcgtgtagtgaatctcacttatcaaggtaaaccagttgatccaaaagcagaatttttgattgcaacgaataactatcgtgcttacggcaataaattcccaggtactggcgatcaacatattgtttacgcatcaccagatgaaagccgtcaaattttggctgattatattaaagcaaccagtgagaaagaaggttcagtcaatccaaatgcggataaaaactggcgttttgtgcctatcacaggtaacgataaattagatgtccgttttgaaacatcgccaagcgaacaagcggcgaaatttatcgcagaaaaagcacaatatccgatgaaacaggtgggtactgacgaaatcggttttgcagtgtatcaaattgatttatctaaataa

SEQ ID NO: 1214 - protein, 657 aa, Haemophilus influenzae
MMNRRHFIQIGATSILALSANRFAMAKGKSDVELRIVATTDVHSFLTDFDYYKDAPTDKFGFTRAASLIRQARAEVKNSVLVDNGDLIQGNPIADYQAAQGYKEGKSNPAVDCLNAMNYEVGTLGNHEFNYGLNYLADAIKQAKFPIVNANVVKAGTEEPYFTPYVIQEKSVVDNQGKTHKLKIGYIGFVPPQIMVWDKANLQGKVETRDIVKTAQKYVPEMKKKGADIVVALAHTGPSDEPYQEGAENSAFYLADVPHIDAVIFGHSHRLFPNKEFAKSPNADIVNGTVKGVPESMAGYWANNISVVDLGLTEHKGKWIVTSGKAVLRPIYDVETKKALAKNDPEITALLKPVHEATRKYVSQPIGKATDNMYSYLALVQDDPTIQIVNQAQKAYVEKVAPSVAAMAGLPILSAGAPFKAGGRKNDPTGYTEVNKGELTFRNAADLYLYPNTLVVVKATGEQLKEWLECSAGMFKQIDPTSDKPQSLIDWEGFRTYNFDVIDGVNYEYDLTKPARYDGECKLINPESHRVVNLTYQGKPVDPKAEFLIATNNYRAYGNKFPGTGDQHIVYASPDESRQILADYIKATSEKEGSVNPNADKNWRFVPITGNDKLDVRFETSPSEQAAKFIAEKAQYPMKQVGTDEIGFAVYQIDLSK

SEQ ID NO: 1215 - DNA, 1272 bp, Haemophilus influenzae
atgaatttagatttaaatcaacttgttaaatggcgtcgtgaatttcatcgtttcccagaaattggttggagtgaattttggacaacttctcgtattgcggattacttggaagacttaggttgttttaaaatttttcttggcaaacaaattataaatccggactttgttcgtggacgaaaacaagccgtagtagataaaggtttagctaatgcaaaagcctatggagccaatgaaaaatggctcgaaaaaatggaagggtacactggttgtgtggcattatttgattcaggtaaaccaggaaaaaccatcgcgttacgttttgatatcgactgtgtgaatgtaacggaaactcgctcacccgagcatattccaaataaagaaggttttgcctcaattaacgatggttttatgcatgcttgtggacatgattcacatattacaataggtttaggtgttgcattatggatcgctcagaacaaagataaactcactggaaaagtaaaaattgtattccaaccagcagaagaaggtgttcgaggtgcagcagccattgcacaaagtggcataattgatgatgtagattattttgcttcttcacatattagtttttgcgcaaatacaggcacagttattgctaatccaagaaattttctttccactacaaaaattgatattcgctataaaggtaaacctgcacacgcaggtgctgcgccccatttaggtcgtaatgctttattagctgcagcgcatacagtcactcaacttcatggtatcgcacgccatggtgaaggcatgacaagaattaatgtgggtgtgctaaaagcgggtgaaggacgaaatgtcattccatcctctgctgaattacaattagaagtgcggggagaaaataaagcaattaatgaatacatgactgaacaagtcatgcaaatagccaaaggtatctccataagttttgatgtcgcatatgaaactgaaattgtaggtgaagcagtggatatgaataacgatgttgaacttataaaactcatcgaagaaatatctcttgaacaaccacaaataaataacgtaaattcagattatgctttcaatgcaagtgaagatgcgactattttaggtagacgtgtacaagaacatggaggcaaagctatttacttcattcttggcgcagatcgcacagcaggtcatcacgaagctgaatttgattttgatgaaaatcaattacttactggggttaatatttatacttccttagtacagaaattattagcttaa

SEQ ID NO: 1216 - protein, 423 aa, Haemophilus influenzae
MNLDLNQLVKWRREFHRFPEIGWSEFWTTSRIADYLEDLGCFKIFLGKQIINPDFVRGRKQAVVDKGLANAKAYGANEKWLEKMEGYTGCVALFDSGKPGKTIALRFDIDCVNVTETRSPEHIPNKEGFASINDGFMHACGHDSHITIGLGVALWIAQNKDKLTGKVKIVFQPAEEGVRGAAAIAQSGIIDDVDYFASSHISFCANTGTVIANPRNFLSTTKIDIRYKGKPAHAGAAPHLGRNALLAAAHTVTQLHGIARHGEGMTRINVGVLKAGEGRNVIPSSAELQLEVRGENKAINEYMTEQVMQIAKGISISFDVAYETEIVGEAVDMNNDVELIKLIEEISLEQPQINNVNSDYAFNASEDATILGRRVQEHGGKAIYFILGADRTAGHHEAEFDFDENQLLTGVNIYTSLVQKLLA

SEQ ID NO: 1217 - DNA, 1296 bp, Haemophilus influenzae
atggaattattcaaatccatcgttgcagtgattggcattattgccacaatttattttctgattaaaaaagccgaaacccgaacagttttgattggtgtcggtttaataatgtccattctgacgctgaatccaatgggtgcattagatgcttttgccaaaagcatgacatctggcggattaattatggccatctgttctagtatgggttttgcttatgtaatgaaatacactcaatgtgacactcatctagtgcatttacttaccaaaccattaagcggattaaaattcttcttaattccgattgcaacagtcatcacctttttcatcaatattgctattccttctgctgctggttgtgcagctgcggttggtgcaacattaattcctgttttaaaaagtgcgggtgttcgaccagctactgctggtgcagctattttagcaggaacttttggatcaatgatgagcccaggttcttctcactcagcaatgattagtgaaatgtcaggcttaactatcactcaagtaaacctttcacatgcgccatataacatgattgcgggagcaataggtgctgttgttttaacaattcttgcgcttgtttttaaagattatggtgaacaacatcgccaagcttatcttgcagaacaaaaagaaaatgaaattaaagttgttgaaggtgtcaatgtactttatgcccttgcaccattaataccattagttattttagtgattggtggaacatcattacaacaagtaccgggtcttgaatggactaaaatgggcgttcctcaagcgatgctgattggtgcaatttacggcattatcgtcactcgtatttctccagtaaaaattactgaagaatttttcaatggtatgggaaattcttatgcaaacgtacttggtattatcattgcagccagtgtatttgtggcaggattaaaatctacgggcgcagttgatgcggcaatttctttcttaaaagaatccaacgaatttgtacgttggggtgcaacaattggaccattcttaatgggtttaattacaggctctggcgatgcagcagcgattgcctttaacactgctgtcacaccacatgctgtagaactcggctacactcacgtaaatcttggtatggcagcagcaattgctggtgcaattggtcgtactgcttcaccaattgcaggcgtaactattgtttgtgcaggacttgcgatggtaagcccagtagaaatggtaaaacgcaccgcaccaggcatgatacttgcagttttattcttagcattatttatgttgtaa

SEQ ID NO: 1218 - protein, 431 aa, Haemophilus influenzae
MELFKSIVAVIGIIATIYFLIKKAETRTVLIGVGLIMSILTLNPMGALDAFAKSMTSGGLIMAICSSMGFAYVMKYTQCDTHLVHLLTKPLSGLKFFLIPIATVITFFINIAIPSAAGCAAAVGATLIPVLKSAGVRPATAGAAILAGTFGSMMSPGSSHSAMISEMSGLTITQVNLSHAPYNMIAGAIGAVVLTILALVFKDYGEQHRQAYLAEQKENEIKVVEGVNVLYALAPLIPLVILVIGGTSLQQVPGLEWTKMGVPQAMLIGAIYGIIVTRISPVKITEEFFNGMGNSYANVLGIIIAASVFVAGLKSTGAVDAAISFLKESNEFVRWGATIGPFLMGLITGSGDAAAIAFNTAVTPHAVELGYTHVNLGMAAAIAGAIGRTASPIAGVTIVCAGLAMVSPVEMVKRTAPGMILAVLFLALFML

SEQ ID NO: 1219 - DNA, 705 bp, Haemophilus influenzae
atgaaaaacatgttactgctcagtagctcaaaatacaagaacacaggttatcttgaacacactctaccttggttacaaaatttcttggctgattatcgtggtaaaacaattgcttttgtgccttatgctggggtactccgcacttttgatgaatatgaaaaaactgtgcaaaatgcactttcttatttagagatgaatattgtttccgttcatcatggtaaacagcatcgagatattattgaacaagcagatgtcattgctattggcggcgggaatacattttgtttgttaaaacagctttatgaacacaatttaattgatatcattcgtgaaaaagtgaataacggtacgccttattttggttggagtgctggggcaaatgtagcgggtgcatccattatgacaacgaatgatatgccgattacttatcctccttcatttcaagcattacaactttttcctcatcaaattaatccgcactttatttcaggtaaaatgcaaggccacaatggtgaaagccgagaagaacgtttagccgaatttttactcgttaatccaaccgcacttgtatatgcattgcctgaaggttctgcacttcatatacaaaatgaaatggcaactgtgttgggtgaaaatcctattttgtgcttcagtgaaaatatggaatgtggcacatttgatatcaatacaactttttcttattaa

SEQ ID NO: 1220 - protein, 234 aa, Haemophilus influenzae
MKNMLLLSSSKYKNTGYLEHTLPWLQNFLADYRGKTIAFVPYAGVLRTFDEYEKTVQNALSYLEMNIVSVHHGKQHRDIIEQADVIAIGGGNTFCLLKQLYEHNLIDIIREKVNNGTPYFGWSAGANVAGASIMTTNDMPITYPPSFQALQLFPHQINPHFISGKMQGHNGESREERLAEFLLVNPTALVYALPEGSALHIQNEMATVLGENPILCFSENMECGTFDINTTFSY

SEQ ID NO: 1221 - DNA, 201 bp, Haemophilus influenzae
atgtcaattaatcttaatcgtgttcaaaatttaattgaaaaactggcttttatttcatgttatatcagtgaaaaagagatcatccgtgagattttaatctttatgttgaccgcactttcctttgttatggttaaacgttacacccgaaaactcggccaacaaacagaatttcagcctattttgttaagagtattatcctaa

SEQ ID NO: 1222 - protein, 66 aa, Haemophilus influenzae
MSINLNRVQNLIEKLAFISCYISEKEIIREILIFMLTALSFVMVKRYTRKLGQQTEFQPILLRVLS

SEQ ID NO: 1223 - DNA, 1320 bp, Haemophilus influenzae
atgagcgctaaaagtaataaaattggtgtagtacaactcaccattcttaccatggttaatatgatgggttccggtatcattatgttaccgaccaaattagccgaaattgggactatttccatcgtttcttggcttgtaacagccgttggttcaacagccttagcttatgcattcgcacaatgcggtatgttcagtaaaaaatctggtggtatgggcggttatgcggaatactctttcggtaaagccggtaacttcatggctaactacacttacggtgtatcattagttattgcgaatacagcaatcgcgatttctgcggtgggttatggttcagagcttctcggtgcaaccctttctccactttctatcgcattatggaccatcttcaccctttggcttgcaaccgttcttaactttggtggtgcaagaatcaccggtaatataagttcatttactatctggggcgtaattatccctgtagttggtatttctatcattggttggaaatggtttgatggttcaatgtatgtaaactcttggaacccacataatgtaccaacttttgaagcgatcggtgtatctatttcaatgacattatgggcgttcttagggttagaatcagcttgcgctaacgcagatgcagttgaaaatccagagaaaaacgtaccaatcgcagtacttggtggtactttaggggcagcggtaatttatattgtttcaactaacgtgattgcaggtattgtacctaaccttgaactcgctaattcaacagcaccattcggtttagcctttgctcatatgtttgatgaaattgtcggtaaagttatcatggtcttaatggtgatgtcttgctttggttcattattaggctggcagttcactattgctcaagtattcaaatcttcagcagaagaaggttatttcccagcattcttcaaaaaagttaccagtaaagatgcgcctgttgttggtatgattaccattactgcgttacaaactttactctctttaatgacaatcagcccatcattaaataaacaattcaatgtgttggtagacttagcggtagtaacaaacgttattccatacttgctctcaatggctgcacttgcagtgttattgaaagcagagaatgttacgccacaaaaatataaaacaaccgtttttgttgcctttattggttcactttatagtatctatgcactttatgcagccggtgaacaagcgatgttatatggttcaattgtgacctttatcggttggacattgtatggttttgtttcttacaaatttgaccttaaaaaatcacaagctaattaa

SEQ ID NO: 1224 - protein, 439 aa, Haemophilus influenzae
MSAKSNKIGVVQLTILTMVNMMGSGIIMLPTKLAEIGTISIVSWLVTAVGSTALAYAFAQCGMFSKKSGGMGGYAEYSFGKAGNFMANYTYGVSLVIANTAIAISAVGYGSELLGATLSPLSIALWTIFTLWLATVLNFGGARITGNISSFTIWGVIIPVVGISIIGWKWFDGSMYVNSWNPHNVPTFEAIGVSISMTLWAFLGLESACANADAVENPEKNVPIAVLGGTLGAAVIYIVSTNVIAGIVPNLELANSTAPFGLAFAHMFDEIVGKVIMVLMVMSCFGSLLGWQFTIAQVFKSSAEEGYFPAFFKKVTSKDAPVVGMITITALQTLLSLMTISPSLNKQFNVLVDLAVVTNVIPYLLSMAALAVLLKAENVTPQKYKTTVFVAFIGSLYSIYALYAAGEQAMLYGSIVTFIGWTLYGFVSYKFDLKKSQAN

SEQ ID NO: 1225 - DNA, 2163 bp, Haemophilus influenzae
atgccaaacttaaaaattgcatataatccaaaagttgaacaatatttctctacaaatagagaattagttgaaattaccaaaacagactttactgatgttgcagctatcatgttgacatcaggggatgtaggtgaataccttgaacgtattcaaacaacaaattttggtatcccagtatttgttgttcaaactgaagaagaacaagttgatccggaattctatgatgctatttatcatattcaagatttaaatggttatgacattaagctttatagccgtcaaatcgaaactgctgcaagactttatgaagaaaaaatgttacctccattcttcaaaatgttaagtgaatatgtagaaatgggtaatattgcttttgactgtccgggacatcaaggtggtcaatactaccgtaaacacccagcaggtcgtttcctttatgacttctacggtgaaaacattttccgttcagatatttgtaatgcagacgtgaaattaggtgacttgttaattcacgaaggtgcagcttgtgatgcacaaaaatatgctgctcaagtattcaatgcagataaaacttacttcgtattaaatggtacatcttcttcaaacaaagttgcattaaacgcagtacttgctccgggcgatttagtattatttgaccgtaataaccataaatcaaaccaccatggtgcattaattcaagcgggtgcaaccccaatttacttagaaactgcacgtaatccatttggtttcattggtggtatcgatagtcactgcttcgaagaagattatttgaaatcattaattaaagaagtggcgcctgaaaaattaaaccaaaaacgtccattccgtttagccgttattcaattaggtacttatgacggtacaatttataacgcacgtcaagtggtagataaaattggtcatctttgtgactacatcttattcgactctgcatgggtaggttatgaacaatttattccaatgatgaaagactgctctccattattgcttgaattaaatgaaaatgaccctggtattttagtgactcaatctgttcataaacaacaagcaggtttctcacaaacttcacaaattcacaaaaaagataaacacattaaaggtcaagatcgttatgtaaaccacaaacgtttcaataatgcctttatgttacatgcgtcaaccagtccgttctatccattatttgcggcgttagatgtgaatgcaaaaattcaaggtagcgaagcgggtcgtcgcttatggcatgaatgtgtgaaagtaggtatcgaagcgcgtaaattagtgttaaatcactgtgaattaattcgtccatttattccaaccacaattaaaggtaaaaaatggcaagattatgacacagaagaaatcgcaactaatctcgaattcttcaaattccacccaacagatacatggcataaatttgaaggctatgctgatgaacaatacttcgttgacccttgtaaattcttgcttaccacaccaggtattagcttagaaacaggcgaatatgaaaaatttggtgtaccagcaactattcttgctaactacttacgtgaaaacggtattattccggaaaaatgtgacttgaactcaatcttattcttgctcactccggcagaaaccctcaccaaaatgcaaactttggtcgctcaaatcgccttgtttgaaaaacacattaaacaagactctttattaaaagatgtattgccaactgtgtataaaaacaatgaagaccgttacaaagactatactatccgtcaattatgccaagaaatgcatgacctttatgtaagccgcaatgtaaaacaacttcaaaaagacctattccgtaaagcaacattaccggaatatgcgttaaatccacacgatgcgaatattgaattcgttcgtaacaaagttgaactcgttccattgactgatattgttggtcgtgtggctgcggaaggtgcattaccttatcctccaggtgtgttatgtgtggtgcctggagaaagatggagtccaactgcacaaaaatacttccttgcattagaagaaggtatcaacacattacctggtttcgcacctgaaatccaaggggtttacttacaaaaagaccctgatggacgtactcgtgcatatggctatgttttaactgactattaa

SEQ ID NO: 1226 - protein, 720 aa, Haemophilus influenzae
MPNLKIAYNPKVEQYFSTNRELVEITKTDFTDVAAIMLTSGDVGEYLERIQTTNFGIPVFVVQTEEEQVDPEFYDAIYHIQDLNGYDIKLYSRQIETAARLYEEKMLPPFFKMLSEYVEMGNIAFDCPGHQGGQYYRKHPAGRFLYDFYGENIFRSDICNADVKLGDLLIHEGAACDAQKYAAQVFNADKTYFVLNGTSSSNKVALNAVLAPGDLVLFDRNNHKSNHHGALIQAGATPIYLETARNPFGFIGGIDSHCFEEDYLKSLIKEVAPEKLNQKRPFRLAVIQLGTYDGTIYNARQVVDKIGHLCDYILFDSAWVGYEQFIPMMKDCSPLLLELNENDPGILVTQSVHKQQAGFSQTSQIHKKDKHIKGQDRYVNHKRFNNAFMLHASTSPFYPLFAALDVNAKIQGSEAGRRLWHECVKVGIEARKLVLNHCELIRPFIPTTIKGKKWQDYDTEEIATNLEFFKFHPTDTWHKFEGYADEQYFVDPCKFLLTTPGISLETGEYEKFGVPATILANYLRENGIIPEKCDLNSILFLLTPAETLTKMQTLVAQIALFEKHIKQDSLLKDVLPTVYKNNEDRYKDYTIRQLCQEMHDLYVSRNVKQLQKDLFRKATLPEYALNPHDANIEFVRNKVELVPLTDIVGRVAAEGALPYPPGVLCVVPGERWSPTAQKYFLALEEGINTLPGFAPEIQGVYLQKDPDGRTRAYGYVLTDY

SEQ ID NO: 1227 - DNA, 468 bp, Haemophilus influenzae
atgcttaaaaaacgcttcgataatatcgatacccgtattcttaaagcattgcaacgcaatggtcgattacaaaataatgaacttgccaacgaaatagggctttcaaattcagcttgtttacgccgagtaaatcaactggaaaaaagcagcgtaattgatagttatgttgccttattgaatcccaagaaaataaattgtcatcttatcgtttatgcattaggttctttctttgaagaagatccagaattaaaagagcggtttatttttgaagtgaaactaatccctcaaattaccgaatgccattttatggctggtagctttgatttcttattaaaactcaatgtatcagatcttgatcaatttaattacatcaaaaatacctatcttaattctaggcttggcattaaaaccttaaaatcagaagttactctaaaaacggtcaaatcaacaactgaattgcctttataa

SEQ ID NO: 1228 - protein, 155 aa, Haemophilus influenzae
MLKKRFDNIDTRILKALQRNGRLQNNELANEIGLSNSACLRRVNQLEKSSVIDSYVALLNPKKINCHLIVYALGSFFEEDPELKERFIFEVKLIPQITECHFMAGSFDFLLKLNVSDLDQFNYIKNTYLNSRLGIKTLKSEVTLKTVKSTTELPL

SEQ ID NO: 1229 - DNA, 1530 bp, Haemophilus influenzae
atggatgcgtccaaaaagaagaaaacgtttaatttcccatcagcgtttacaattttatttgcaatattaattctcgctgttggattaacctggataattccatctggttcatattcaaaattaacatataattccactgataatgtctttgtggtcaaagcttatggcgttgatgataaaacttatcccgccacaacagacactcttgataatctcaatataaaaattaaactctccaatttcaccgaaggcgtgatcaaaaaaccaatcgctattcctggcacctatcaacgtgtagaacaacaccacaaaggcattgaagacatcaccaaaagtatggtggaaggaactatcgaagccgttgatgttatggtctttatcttcgtattggggggtatgattggtgttattaaccgtaccggttcttttaatgccggtttgatggctctcgtgaaaaaaaccaaaggcaatgagttttttattgtattcagcgtatctgttttaatggtgttaggcggtacaacctgtggtatcgaagaagaagcagtggcattctatccgattctggtgccagtattcttagctctgggatatgatgcaatagtctgtgtaggagctatattccttgcttcatctatgggaacggcattctctacaattaacccattctccgttgttatcgcatcaaatgcagctggtattcaatttactgaaggtattggtttccgtgctctaggtttagctttaggcgcaacttgcgtaatcgtatatctttattggtactgtaaaaaaatcaaagctgacccaagtttttctttcacttatgacgatcgcgaagaatttcgccaacgttatatgaagaactttgatccaaatgcaactatcgcattctcagctcgtcacaaattaatcttaacgcttttctgcattgcattccctattatgatttggggtgtaatggttggcggatggtggttccctcaaatggctgcatctttcctttccattactatcatcattatgtttatcagtggcttgtctgaaaaagatattgtggaatctttcactgaaggtgcatcagaattagtaggcgtatccttaatcattggtcttgctcgtggcgtaaacttagtactcgaacaaggtatgatttctgacaccatccttgattatatgtctaatgtagttagtggtatgccaggtagcgtattcatcttaggtcaattagtcgtatttattttcctaggcttaatcgtgccgtcttcttcaggcttagccgtgctttcaatgccaattatggctccacttgctgactcagtgggtattccacgcgatatcgtggtttctgcttacaactggggacaatatgcaatgctattcttagcaccaacaggattagtattggtgacactccaaatgttgcatattccatttgatagatgggttaaattcgtgatgcctatgattggatgtttattactaatcggatctattttactggtagtacaagtatccttatatagcgtttaa

SEQ ID NO: 1230 - protein, 509 aa, Haemophilus influenzae
MDASKKKKTFNFPSAFTILFAILILAVGLTWIIPSGSYSKLTYNSTDNVFVVKAYGVDDKTYPATTDTLDNLNIKIKLSNFTEGVIKKPIAIPGTYQRVEQHHKGIEDITKSMVEGTIEAVDVMVFIFVLGGMIGVINRTGSFNAGLMALVKKTKGNEFFIVFSVSVLMVLGGTTCGIEEEAVAFYPILVPVFLALGYDAIVCVGAIFLASSMGTAFSTINPFSVVIASNAAGIQFTEGIGFRALGLALGATCVIVYLYWYCKKIKADPSFSFTYDDREEFRQRYMKNFDPNATIAFSARHKLILTLFCIAFPIMIWGVMVGGWWFPQMAASFLSITIIIMFISGLSEKDIVESFTEGASELVGVSLIIGLARGVNLVLEQGMISDTILDYMSNVVSGMPGSVFILGQLVVFIFLGLIVPSSSGLAVLSMPIMAPLADSVGIPRDIVVSAYNWGQYAMLFLAPTGLVLVTLQMLHIPFDRWVKFVMPMIGCLLLIGSILLVVQVSLYSV

SEQ ID NO: 1231 - DNA, 933 bp, Haemophilus influenzae
atgagaatagtgattgcattaggcggtaatgcgttattacgacgcggagaaccaatgacagccgaaaatcaacgacaaaatgttcgcattgcttgtgagcaaattgctaagatttggccaaataatgaattagtgatagcacacggtaatggcccacaagtgggtttgctcgccttacaaggtgctgcctatactgatgtgccaacctatcctttagatgtattgggagcagaaacagctggaatgattggttatatgattcaacaagaactcggtaatttagttccatttgaagtgccatttgcaacgttattatctcaagtagaagttgatatcaacgacccagctttcaaaaatccaactaaaccaattggtcctgtttatacgaaagaagaggctgaacgtttggcaaaagaaaaaaattggtctatcgcacaagatggagataaatatcgtcgcgttgtgccaagcccattgccaaaacgtatttttgaaattcgcccagtaaaatggttgcttgaaaaaggcagtatcgtcatttgtgcgggtggcggtggtattccaacttattatgatgaacagcataatttacaaggtgttgaagctgttatagacaaagatttatgttcagctttacttgcagaaaatcttgatgctgatttattcatcattgcaactgacgtttccgcaaccttcgtagattggggaaaaccaacccaaaaagcaatttcagttgcctcacctaaagcgatttcagaacttggttttgcagcaggttctatgggaccaaaagtacaagcagccatcaactttgcgaaacaaacaggaaaagatgcagtaataggttctttatctgatattgtggatattgtgaaaggcaaagctggtacacgtattacgaaaaaagctgaaggcatatcctattacgcttaa

SEQ ID NO: 1232 - protein, 310 aa, Haemophilus influenzae
MRIVIALGGNALLRRGEPMTAENQRQNVRIACEQIAKIWPNNELVIAHGNGPQVGLLALQGAAYTDVPTYPLDVLGAETAGMIGYMIQQELGNLVPFEVPFATLLSQVEVDINDPAFKNPTKPIGPVYTKEEAERLAKEKNWSIAQDGDKYRRVVPSPLPKRIFEIRPVKWLLEKGSIVICAGGGGIPTYYDEQHNLQGVEAVIDKDLCSALLAENLDADLFIIATDVSATFVDWGKPTQKAISVASPKAISELGFAAGSMGPKVQAAINFAKQTGKDAVIGSLSDIVDIVKGKAGTRITKKAEGISYYA

SEQ ID NO: 1233 - DNA, 1005 bp, Haemophilus influenzae
atggctttcaatatgaaaaatagacatttacttagtcttgttcatcacacagaacgtgaaattaaatatctcttagatctctcccgagatttgaaacgagccaaatatgctggcacagaacaacaaaaattaaaaggcaaaaatatcgcgctcatctttgaaaaaacctccacccgcacacgctgtgcatttgaagtcgccgcttatgatcaaggcgcacaagtcacctacatcgaccctaattcctctcaaattggccacaaagaaagtatgaaagataccgcccgcgtattaggcagaatgtatgatggcattgaatatcgtggctttaaacaaagtatcgttcaagaactggctgattatgctggagtgccagtattcaatggtttaaccgatgaattccacccaacacaaatgcttgccgacgtacttaccatgattgaacattgcgacaaaccattaagtgaaattagctatgtatatattggggatgctcgcaataacatgggtaattcacttttattaattggtgcaaaattaggtatggatgttcgtatttgtggacctaaagcattattaccagaagcaagtcttgtggaaatgtgcgaaaaatttgcgaaagaaagtggagctcgtattactgtaactgaagatatcgacaaagcggtgaaaggcgtagattttatccatactgatgtgtgggtttcaatgggtgaaccattagaaacttggggcgaacgcattaaattattacttccttatcaagtcacacctgaattaatgaaacgcactggtaatccaaaagtgaaatttatgcactgcttgccagccttccataacagcgaaaccaaagttggtcgtcaaattgctgaaaaatatcctgaattagctaatggtattgaagtaactgaagacgtatttgaatcgccaatgaacattgcatttgaacaagcagaaaaccgtatgcacacaattaaagcggtaatggtagcaagtttggcttaa

SEQ ID NO: 1234 - protein, 334 aa, Haemophilus influenzae
MAFNMKNRHLLSLVHHTEREIKYLLDLSRDLKRAKYAGTEQQKLKGKNIALIFEKTSTRTRCAFEVAAYDQGAQVTYIDPNSSQIGHKESMKDTARVLGRMYDGIEYRGFKQSIVQELADYAGVPVFNGLTDEFHPTQMLADVLTMIEHCDKPLSEISYVYIGDARNNMGNSLLLIGAKLGMDVRICGPKALLPEASLVEMCEKFAKESGARITVTEDIDKAVKGVDFIHTDVWVSMGEPLETWGERIKLLLPYQVTPELMKRTGNPKVKFMHCLPAFHNSETKVGRQIAEKYPELANGIEVTEDVFESPMNIAFEQAENRMHTIKAVMVASLA

SEQ ID NO: 1235 - DNA, 819 bp, Haemophilus influenzae
atgaatttaccttttcgagcaatggtgtctgatttagatggcacacttttaacacctgaacatttagtcggtgatcttaccattgatacgctgagagcattagagcaaaaaggcgtagatattattttggcaacaggacgcaatcataccgatgtgtcatccattcttggaaaaattggtgcggaacgtgcggttatgattacatcaaacggtgctcgtgtacgggatttacagggtaatttgctttatagcaatagtttgcctgaagaattagttcttgagctttacaaaacgccatttgatacttccaaagtatgcatgaatagctatcaagatgaaggttggtttactaataaagatattcctgcaatgcgtcagttccataaagaatctggattcgattataacgttgtcgatttctctaaacatcatggacgtgggacagaaaaagtcttttttattggtaaaacgccagaggatttagttgaagtagaaacttatttacgagataagtttggtgacgtaacgacaattgtttattctgcattagcttgtttggaagtaatgaataagaatgtttcaaaaggggatgcattaaaacatttactcgaatcacgcgagtatcagttaaaagactgtattgcttttggtgatggaatgaatgatgtagaaatgctttcttgggctggtaaaggctgtatcatgcaagatgcagatattcgtttaaaaacggcttgttcagatttggaagtaattggctcaaataaagaagaatcagtcgctcgttatttgcgaacccaatttggattagattattaa

SEQ ID NO: 1236 - protein, 272 aa, Haemophilus influenzae
MNLPFRAMVSDLDGTLLTPEHLVGDLTIDTLRALEQKGVDIILATGRNHTDVSSILGKIGAERAVMITSNGARVRDLQGNLLYSNSLPEELVLELYKTPFDTSKVCMNSYQDEGWFTNKDIPAMRQFHKESGFDYNVVDFSKHHGRGTEKVFFIGKTPEDLVEVETYLRDKFGDVTTIVYSALACLEVMNKNVSKGDALKHLLESREYQLKDCIAFGDGMNDVEMLSWAGKGCIMQDADIRLKTACSDLEVIGSNKEESVARYLRTQFGLDY

SEQ ID NO: 1237 - DNA, 387 bp, Haemophilus influenzae
atgcaggcattattattcataagttgtggtgcaatattaggcgcgtcattgcgttgggctataggattgttatttaatcctttattttcctcatttgcttttgggactttaatcgctaatttgcttggttgtttaattattggtgtattacttgggcttttttggcaatttccacaaattagttctgaatggcggttatttttaattacgggttttttaggatcgctaaccacattttcgtctttttcttccgaagttgtggaattattttttaatgacaagtggttaaatggattttgtgtattaatgatgcatttattcggatgtttagctatgactgtgttaggcatttggatatataaaatttgttctcaacttttatcttaa

SEQ ID NO: 1238 - protein, 128 aa, Haemophilus influenzae
MQALLFISCGAILGASLRWAIGLLFNPLFSSFAFGTLIANLLGCLIIGVLLGLFWQFPQISSEWRLFLITGFLGSLTTFSSFSSEVVELFFNDKWLNGFCVLMMHLFGCLAMTVLGIWIYKICSQLLS

SEQ ID NO: 1239 - DNA, 459 bp, Haemophilus influenzae
ttgtcatctcttgcttttaattacatagttaatcttctttcccgcagagaatatagtgaattcgagctccgcaataaaatgcaggaaaagaacttttcggaagaagaaattgatgatgcattatctttatgccaagcaaaaaattggcaaagcgatcgtcgtttttcagaaaattatctaaattcacgctcacaaaaaggttatggtgtaggaagaattcgacaagaattacgccaattaaaaggtgtgtcttctgatattattgatgaagttttaatggaatcagaaattgattggtatgaaatggctgagaacttgttacgtaaacaattcccaaattataacgaacagcaaacgcctaaaatgaaacaaaaaatttggcaatatatgctatcacacggatttcgtagcgatgaatttgctgatttaattgggcaaaaccaaagtgaatgggattaa

SEQ ID NO: 1240 - protein, 152 aa, Haemophilus influenzae
MSSLAFNYIVNLLSRREYSEFELRNKMQEKNFSEEEIDDALSLCQAKNWQSDRRFSENYLNSRSQKGYGVGRIRQELRQLKGVSSDIIDEVLMESEIDWYEMAENLLRKQFPNYNEQQTPKMKQKIWQYMLSHGFRSDEFADLIGQNQSEWD

SEQ ID NO: 1241 - DNA, 1065 bp, Haemophilus influenzae
atggcaactcaagaagaaaaacaaaaagcactagcagctgcattagggcaaatcgaaaaacaatttggtaaaggctcaattatgaaattaggcgataccaaaacgttagacgtagagtctatttctactggatcacttgggttagatgttgcgcttgggattggtggtttgcctatgggtcgaattgtagaaattttcgggcctgaatcatcgggtaaaacaacattaactctttccgtcattgctcaagcgcaaaaagcaggaaaaacctgtgcatttattgatgcagaacacgcacttgatcctatttatgcagcaaaacttggtgtagatgtaaaagaactttttgtttctcaaccagataatggggaacaggcacttgaaatctgtgatgcattagttcgctcaggtgcaattgatgtaattattgtggactccgttgccgcactgacaccaaaagccgaaattgaaggcgatatgggcgattctcatatgggtctgcaagcacgtttaatgtctcaagctttgcgtaaactcacaggtcaaattaaaaatgcaaactgtctagttgtgtttattaaccaaatccgtatgaaaataggcgtgatgtttggtaatcctgaaaccaccacaggcggtaatgcattaaaattctattcttctgttcgcttagatattcgccgtacaggttctgtaaaagatggcgaaaatattattggaaatgaaacccgcgtaaaagtagtgaaaaacaaattagcggcaccgttccgccaagtggatttccaaattctctatggagaaggcatttcaaaagcaggtgaattattagaacttggggtaaaacacaaacttgtagaaaaatcaggcgcctggtattcctacaatggtgaaaaaattggtcaaggaaaggctaattcaatgaaatggcttaacgaaaatatagagaaatcagatgaattagaagctcgtttacgtgctgaattagtggccaatccagaacaagccttaatggcggatattgaacaatctgaaaataatactgaatcagaaagtgattttgaataa

SEQ ID NO: 1242 - protein, 354 aa, Haemophilus influenzae
MATQEEKQKALAAALGQIEKQFGKGSIMKLGDTKTLDVESISTGSLGLDVALGIGGLPMGRIVEIFGPESSGKTTLTLSVIAQAQKAGKTCAFIDAEHALDPIYAAKLGVDVKELFVSQPDNGEQALEICDALVRSGAIDVIIVDSVAALTPKAEIEGDMGDSHMGLQARLMSQALRKLTGQIKNANCLVVFINQIRMKIGVMFGNPETTTGGNALKFYSSVRLDIRRTGSVKDGENIIGNETRVKVVKNKLAAPFRQVDFQILYGEGISKAGELLELGVKHKLVEKSGAWYSYNGEKIGQGKANSMKWLNENIEKSDELEARLRAELVANPEQALMADIEQSENNTESESDFE

SEQ ID NO: 1243 - DNA, 378 bp, Haemophilus influenzae
  misc_feature 351, 352, 353, 354, 355: n is any nucleotide
atgtttgccatttggcaaaataaaaaactttatttacgcggtgagggtgttctcgcaattcaattaactaaattaggttgtgaaccttttacaacgaatgaattgaataaacggtttgtgctttcacaatattatgcactttctgatcagattttacgtagtaatagattgtgtagaaaattgattattctttctattaagcagattcttgagcggaagctagaatgtacgttaagaaaattgaatcgattaaaggatttacccaatttaacgattaaacatgaaagagctttaataaaagttggtattacaaatgttgcgatgctaagagagatggcgcagaaaatgcannnnncattccattcattaattaattaa

SEQ ID NO: 1244 - protein, 125 aa, Haemophilus influenzae
  VARIANT 117, 118, 119: Xaa is any amino acid
MFAIWQNKKLYLRGEGVLAIQLTKLGCEPFTTNELNKRFVLSQYYALSDQILRSNRLCRKLIILSIKQILERKLECTLRKLNRLKDLPNLTIKHERALIKVGITNVAMLREMAQKMXXXFHSLIN

SEQ ID NO: 1245 - DNA, 891 bp, Haemophilus influenzae
atggatggtgctattttagtcgtagcagcaacagatggtcctatgccacaaactcgtgagcacatcttattaggtcgccaagtaggtgttccatacatcatcgtattcttaaacaaatgcgacatggtagatgacgaagagttattagaattagtagaaatggaagttcgtgaacttctatctcaatatgacttcccaggtgacgatacaccaatcgtacgtggttcagcattacaagcgttaaacggcgtagcagaatgggaagaaaaaatccttgagttagcaaaccatttagatacttacatcccagaaccagaacgtgcgattgaccaaccgttccttcttccaatcgaagatgtattctcaatctcaggtcgtggtactgtagtaacaggtcgtgtagaacgtggtatcatccgtacaggtgatgaagtagaaatcgtcggtatcaaagatacagcgaaaactactgtaactggtgttgaaatgttccgtaaattacttgacgaaggtcgtgcaggtgaaaacatcggtgcattattacgtggaaccaaacgtgaagaaatcgaacgtggtcaagtattagcgaaaccaggttcaatcacaccacacactgacttcgaatcagaagtgtacgtattatcaaaagatgaaggtggtcgtcatactccattcttcaaaggttaccgtccacaattctatttccgtacaacagacgtaactggtactattgaattaccagaaggcgtggaaatggtaatgccaggggataacatcaagatgacagtaagcttaatccacccaattgcgatggatcaaggtttacgtttcgcaatccgtgaaggtggccgtacagtaggtgcaggcgttgttgcgaaaatcatcaaataa

SEQ ID NO: 1246 - protein, 296 aa, Haemophilus influenzae
MDGAILVVAATDGPMPQTREHILLGRQVGVPYIIVFLNKCDMVDDEELLELVEMEVRELLSQYDFPGDDTPIVRGSALQALNGVAEWEEKILELANHLDTYIPEPERAIDQPFLLPIEDVFSISGRGTVVTGRVERGIIRTGDEVEIVGIKDTAKTTVTGVEMFRKLLDEGRAGENIGALLRGTKREEIERGQVLAKPGSITPHTDFESEVYVLSKDEGGRHTPFFKGYRPQFYFRTTDVTGTIELPEGVEMVMPGDNIKMTVSLIHPIAMDQGLRFAIREGGRTVGAGVVAKIIK

SEQ ID NO: 1247 - DNA, 420 bp, Haemophilus influenzae
atggaagagtccccagaattagaaaaattgccacgaatcattactgatgtattgaaaattgtgctttgtacagcgttgattgtgctagcgattgtgcttattattgcccttgtaaaaataacttatactttacctatgatggtgcttaacacttcgtctgttgtaccttatgatgttgctgaacaagcagtaatgtttttcttatatttcgggtttattggtttgattgtgcagtattttaaaagcggatatcacttccctttacgctattttatttatgctgggatcactgcgatgttgcgtttaatcattgttaatcatgaaagctcgatggataccatcttatttgcaggcgcaattttgattatggtgatcgcactctgtttggtgttatattctaataaactgaaaaatatatag

SEQ ID NO: 1248 - protein, 139 aa, Haemophilus influenzae
MEESPELEKLPRIITDVLKIVLCTALIVLAIVLIIALVKITYTLPMMVLNTSSVVPYDVAEQAVMFFLYFGFIGLIVQYFKSGYHFPLRYFIYAGITAMLRLIIVNHESSMDTILFAGAILIMVIALCLVLYSNKLKNI

SEQ ID NO: 1249 - DNA, 1287 bp, Haemophilus influenzae
atgtttagagtgctttttttaatgctgacattgcttgtaggacttgtagcagggccttatatttctggtcagcaaggttatgtgcgcattgagacagcaaatcgtattatagaaatgtccatcactaccttagtgatttttttcattatttctttagcaataatttatgcttttgaatggggcatcactcgtttctttcgtttaagtcgtagctcttatcaatggttttctaatcgcaaacgtgtaaaagcgcaaaaacaaacccttgaaggcttggtaaaaatggatgaaggggattacgctaaagcagaaaaattaattggcaaaaatgctaaacattctgctgaacctgtactaaatctcatcaaagcagcagaagccgctcaacaacgtggcgacgaatttagtgcaaatcgctatttaattgaagcaacagaattagccggctctgataatttgctcgtggaaattgcccgtactcgcattttattgcaacaaaacaagttacctgcagcgcgcagttctgtagatagcttattagaaatggctcgtcgcaataaagaagtattaaaactcgcagtagaaatttatcttcgttctaaagcctatcaagctctagataaaattttagacaatgttgcgaatagcggtttattcaatgatgaagaattcaaagctcttcgctctaaaaccgaaaatggtttactcgacgagaaaatgaacgaagaaggaattgatggcttactaacttggtggaatcagcaacctcgtcatcgtcgtagcaatattgaacttaaaattagccttattcaacgtttaattgactgtaatgatcatgaatcagctactgaattgacatttgaaatactgaaaaaactcggtgacaatacagcaatcagtttacctctttgtactcaaattacacgtttacaaccagaagataacagtaaacttctcaagctaatagaaaaacgtgcaaaacgtgtggatgaaaaacaaaaatgctgtatcaatcgtgctttgggttatttatatgttcgtaacaatgaatttattaaagcagcagatgtattcaaaaacgtgatcgcttgccctgaacaattagaacaaaatgatttgatgatggcatcttatgtatttgaacaagcgggcgataaagcattagctgaacaagttcgccaagagagtttgaaatcaatgatggcaattcaggatgtcattccagaaagtgcggaagaaaaaacagaagaaaattcaaccgcacttttagaaagcaaatctgagtag

SEQ ID NO: 1250 - protein, 428 aa, Haemophilus influenzae
MFRVLFLMLTLLVGLVAGPYISGQQGYVRIETANRIIEMSITTLVIFFIISLAIIYAFEWGITRFFRLSRSSYQWFSNRKRVKAQKQTLEGLVKMDEGDYAKAEKLIGKNAKHSAEPVLNLIKAAEAAQQRGDEFSANRYLIEATELAGSDNLLVEIARTRILLQQNKLPAARSSVDSLLEMARRNKEVLKLAVEIYLRSKAYQALDKILDNVANSGLFNDEEFKALRSKTENGLLDEKMNEEGIDGLLTWWNQQPRHRRSNIELKISLIQRLIDCNDHESATELTFEILKKLGDNTAISLPLCTQITRLQPEDNSKLLKLIEKRAKRVDEKQKCCINRALGYLYVRNNEFIKAADVFKNVIACPEQLEQNDLMMASYVFEQAGDKALAEQVRQESLKSMMAIQDVIPESAEEKTEENSTALLESKSE

SEQ ID NO: 1251 - DNA, 1212 bp, Haemophilus influenzae
atggcaaaagagcaacctaacgacctcaccgaacaacttacagatacgcccaaaacagctgttgaacaagctgaaacaatgcagtctgttccgcaaactattgtgaaaaaaacgggtacagcattgagtttattagcaatacttattgctctaggtattggtggagctggatactattttggtcagcagcaaatggctaaaattcaacagaaattaaccgcacttgaaaatcaaacgggagcaaatctttcctcaaataacaccaataacaataaacgacttacacaattagaacagagtttaaaaactgcacaagaaaatatagctcaactggaacaattaattgtaagcaaaacaggggaaataacatccttacaaactcaaatgaaacaagtaagtcagcttgccatcgcacaacaaccaagcgattggttattttccgaagctgattttttactaaataatgccctgcgtaaacttgttttagataacgatgttgatacagcggtttctttattaaaattagctgatgaaaccctcgtcaaggttaataattcacaagcaaatgaaattcgtagtgcaatcaatcaagatttaaaacaacttctttcgctttcaagtgtggatcaaaatgcgataatgcaaaaactatcacagcttgcaaacacagtcgatgaattacaggctttgaatgtaaattttgatgaaacatctaaaaataatgataaattatccaacaacattactgactggcaacaaaatattgaaaaaagcgcaacctctttcctaaatcattttattcgtatttcgccaaaacaaaattcaaataaaaaagaattacttgcaccaaatcaagatatttatcttcgtgagaacattcgtctacgtttacagcttgcgattatggcagttcctcgtcagcaaaatgaactttataaacaatctctagaagctgtttcttcttgggttcgtagctattttgatacaaacgctgaagtaacacaaaatttcttaaaattagtagatggattgactgatacttctatttatgtagatgtaccagagcaattaaaaagtttaacattacttgacaaatatcttaatcgtacagctttagatctacaaaaagtagaaattgaagcagacaaggcgattgatacaatgcctaaagtagaagttgttaaaccaacacaatctgaatcacaacaataa

SEQ ID NO: 1252 - protein, 403 aa, Haemophilus influenzae
MAKEQPNDLTEQLTDTPKTAVEQAETMQSVPQTIVKKTGTALSLLAILIALGIGGAGYYFGQQQMAKIQQKLTALENQTGANLSSNNTNNNKRLTQLEQSLKTAQENIAQLEQLIVSKTGEITSLQTQMKQVSQLAIAQQPSDWLFSEADFLLNNALRKLVLDNDVDTAVSLLKLADETLVKVNNSQANEIRSAINQDLKQLLSLSSVDQNAIMQKLSQLANTVDELQALNVNFDETSKNNDKLSNNITDWQQNIEKSATSFLNHFIRISPKQNSNKKELLAPNQDIYLRENIRLRLQLAIMAVPRQQNELYKQSLEAVSSWVRSYFDTNAEVTQNFLKLVDGLTDTSIYVDVPEQLKSLTLLDKYLNRTALDLQKVEIEADKAIDTMPKVEVVKPTQSESQQ

SEQ ID NO: 1253 - DNA, 2532 bp, Haemophilus influenzae
gtggaatgtaatctagcacaagcaaaacaatgggttagcgccttggatcaacgccgttttgagcgtgcattacaaggttcaggcgatgcattccaacacgttttagcgattgcacctttacttctacacctaaaccatccgcaacttcccggctatgttattcacgccccctctggcattgcgaatttccttgcttctgattatcaaaaaaaatggctcaccaatgaatacggtattcactatgccgatcataagccatcaacactcaaaagtgcggtaaattttcacgaagttttaccaccaattctaggcgtttatgtaatgggtagctttggctcaataagtcaaacctcttcttcagatcttgatacttggatttgtgtccgtgatggcttgagtccagatgaatatacacttcttactcaaaaagccaagcggattagtgaatgggcaatgcaatttaatgtggaaattaatttttatttgatggatcaacaacgtttccgcaatgaacattatgctgacccactgactattgaaaatagcggctctgcgcaatatatgttattgcttgatgagttctatcgctccgccgtacgcttggcaggtaaacctctactttggttgcatttatgggtggaaaatgaaaaagactatgaaaaagaggtggcgcgtttaattacggaaggggaaattgatccaaatgattgggtagatttcggcggtttaggacaattttctgcaaacgaatatttcggtgccagtttatggcatctttataaagggattgattcaccttataaatctgtgctcaaaattttgttgttggaagcctattccaaggaatacccaaacacttgcttaattgcccgcacttttaagcgagatttacttgcaggcaatatcaatcctgatcaccattttgatccttacattgccattcttgcaaaagtaacccaatatttaaccgcactttctgaatttaaacgtttggattttgtgcaccgttgtttctatgtgaaagcaacggaagattttgcacgttaccaagccaataattggcgtattcgttatatggaaatccttgcgcaagaatggggatggtctgcagaaacggtaaaacatctcaataagcgtccattttggaaaattaaggcagtaaaagaaaaccacgataacataatgaaatttttaatgttgagttatcgtaatttagtggaatttgctcgaaagcatcacattcactcgagcgtcgtgccacaagatatcaacattctttctcgtaaactttatactgcttttgaagaacttcccggcaaagtgtccttactcaacacacagatatctcacaatttatcagaaacacacctgacttttgtggaagttcgtggcaataaacattttaaagatggttggtaccttatcaatcaaccaatacaccatattatgttctccaaagaacgggtgatcgaatacggagaaagcctgaataaattagtttcttgggcttatttcaatcatttactcactgaaaaaaccgaattgtcaatttttagcaagaatgtgactttaagtacattacaacgctttgtcactaacttacgtcagtcttttccaagcaccatcgccaaacaacctaaaaatagcgatttattgaatcaatgtgaaattcgtagcttgtttattgccataaatctcacgaccgatccaacatccaaagtagaagaagtattaacgggtatttcatcgcgagatttatttagttttggatcgcttgagcaaagccttgtgggcagtatcgattttacttatcgtaacgtgtggaatgaaatccgaacgctccattttgaagggcaaaatgccattttgcttgcgctaaaagtactttctaacaaaatttatcgtggcgttaatcgcccagattccatccaagtctattgttatagtgaacgttatcgccaagatttacgtcaattagtgatgggattagtcaatcgatgcgttagcatccaagtaggcgatattcaacaaccttgccaaacgtcacgtttacgcgtagcgggtaaaaactggcaattattttttgaagatcgcggcatcagcttacaagaaatcggaaatgaatcggtctgtaatgacgctgaaagtgcggtggattttgacgaagttttacaaacaccaattgaagatggcgagacaaaccaagaaagtcgtcgctatccaccagaaatggatgccttcgcaagtgaaggattcctacaattcttttttgaagataattctgatcacagcttcaatgtttatattttagatgaatctaatcatctcgaaatctatcgccactgcgatggtgaaaaagatgaaaaagtgcgggagattaatcaactttatcaaaacgccaaacaggaaggcgataaaaatccttacaatatcgttcaacataattttaactaccctcaattttatcaactacaaaatggaaaaaatggcatatccattgtgccgtttaaattccgccaaatgaataagtaa

SEQ ID NO: 1254 - protein, 843 aa, Haemophilus influenzae
MECNLAQAKQWVSALDQRRFERALQGSGDAFQHVLAIAPLLLHLNHPQLPGYVIHAPSGIANFLASDYQKKWLTNEYGIHYADHKPSTLKSAVNFHEVLPPILGVYVMGSFGSISQTSSSDLDTWICVRDGLSPDEYTLLTQKAKRISEWAMQFNVEINFYLMDQQRFRNEHYADPLTIENSGSAQYMLLLDEFYRSAVRLAGKPLLWLHLWVENEKDYEKEVARLITEGEIDPNDWVDFGGLGQFSANEYFGASLWHLYKGIDSPYKSVLKILLLEAYSKEYPNTCLIARTFKRDLLAGNINPDHHFDPYIAILAKVTQYLTALSEFKRLDFVHRCFYVKATEDFARYQANNWRIRYMEILAQEWGWSAETVKHLNKRPFWKIKAVKENHDNIMKFLMLSYRNLVEFARKHHIHSSVVPQDINILSRKLYTAFEELPGKVSLLNTQISHNLSETHLTFVEVRGNKHFKDGWYLINQPIHHIMFSKERVIEYGESLNKLVSWAYFNHLLTEKTELSIFSKNVTLSTLQRFVTNLRQSFPSTIAKQPKNSDLLNQCEIRSLFIAINLTTDPTSKVEEVLTGISSRDLFSFGSLEQSLVGSIDFTYRNVWNEIRTLHFEGQNAILLALKVLSNKIYRGVNRPDSIQVYCYSERYRQDLRQLVMGLVNRCVSIQVGDIQQPCQTSRLRVAGKNWQLFFEDRGISLQEIGNESVCNDAESAVDFDEVLQTPIEDGETNQESRRYPPEMDAFASEGFLQFFFEDNSDHSFNVYILDESNHLEIYRHCDGEKDEKVREINQLYQNAKQEGDKNPYNIVQHNFNYPQFYQLQNGKNGISIVPFKFRQMNK

SEQ ID NO: 1255 - DNA, 1008 bp, Haemophilus influenzae
atgataacttcgcaaacaccaatcactgtgctaggtgcgggatcttatggaactgcgctggcaattaccttttctcgcaatggttctcccactcacttatgggggcacaatcccgtccatatcgcacaaatgcagacagaacgacaaaattatcgttttttgccggatgtcatctttcctgaggatcttcatttagaaagtaatcttgcacaagcaatggaatattctcaagatattttaatcgtggtgccaagccatgctttcggtgaaattcttataaaaatcaaaccgcacttaaaagcccatcaccgattaatttgggcaacaaaaggtttggaacgtaacacagggcgtttactacaaaccgtagttgaagaacaactcggaacgcaatatccactagctgtactttctggcccaacttttgcaaaagaattagcgcaaggtctaccatcagctattacgcttgctgccaataacgagcaattcgcacgggaatttcagtctcgtattcattgtagtaaaggtttccgagtttatataaattcggatatgactggcgttcaacttggtggtgcaattaaaaatgtgatcgcaattggcgcgggtatttcagacggtatgggatttggcgcaaatgctcgcacagcactgattactcgaggtattgcagaaattacccgcttaggtatctcgctcggtgcaaataccaatacatttatgggaatgtctggattgggcgatttagtgctaacttgcaccgataatcaatcgcgcaatcgacgttttggattaatgctaggtaaaggattagatgcccaaatggctatggaaaatatcgggcaagtcgtagaaggtttttataatacaaaagaagcctatttgcttgcacaaagacaaggtgtggaaatgccgattacagaacaaatttatcaaatgctgttttgtggcaaaagcgcacaagatgtagccatcagccttttggggcgagaatgtaaaggcgaataa

SEQ ID NO: 1256 - protein, 335 aa, Haemophilus influenzae
MITSQTPITVLGAGSYGTALAITFSRNGSPTHLWGHNPVHIAQMQTERQNYRFLPDVIFPEDLHLESNLAQAMEYSQDILIVVPSHAFGEILIKIKPHLKAHHRLIWATKGLERNTGRLLQTVVEEQLGTQYPLAVLSGPTFAKELAQGLPSAITLAANNEQFAREFQSRIHCSKGFRVYINSDMTGVQLGGAIKNVIAIGAGISDGMGFGANARTALITRGIAEITRLGISLGANTNTFMGMSGLGDLVLTCTDNQSRNRRFGLMLGKGLDAQMAMENIGQVVEGFYNTKEAYLLAQRQGVEMPITEQIYQMLFCGKSAQDVAISLLGRECKGE

SEQ ID NO: 1257 - DNA, 804 bp, Haemophilus influenzae
atgacattagatgtgtggcaacatattcgccaagaagccaaagaacttgctgaaaacgaacctatgcttgctagtttttttcactctacaattttaaagcatcaaaatctgggcggtgcgctaagttatttattggctaacaaattagccaatcctattatgccagctatttctctccgtgaaattattgaggaagcctatcaatctaatccttcgattattgattgcgctgcttgcgatatccaagctgtccgccaccgagatcccgctgtagaattgtggtccactccattgctttatttaaaaggtttccatgcgattcaaagttatcgaattacccattatttatggaatcaaaatcgtaaatcccttgccctttatttacaaaaccaaatttcagtagctttcgatgtagatattcacccagcggcgaaaattggccatggtattatgttcgatcacgcaacaggtattgttgtgggtgaaacatctgtaatcgaaaatgatgtttcaattttgcaaggggtaacgcttggcggtacgggaaaagaatcaggcgatcgtcatcccaaagtacgcgagggtgttatgattggggcgggtgcaaaaattctcggtaatattgaagtaggtaaatacgccaaaattggggcaaactctgttgtgcttaaccctgtgccggaatatgccacagcggctggcgtgccagctcgaattgtaagtcaagataaagcagcaaaacctgcttttgatatgaaccaatattttatcggcattgatgatggaatgaatttaaatatataa

SEQ ID NO: 1258 - protein, 267 aa, Haemophilus influenzae
MTLDVWQHIRQEAKELAENEPMLASFFHSTILKHQNLGGALSYLLANKLANPIMPAISLREIIEEAYQSNPSIIDCAACDIQAVRHRDPAVELWSTPLLYLKGFHAIQSYRITHYLWNQNRKSLALYLQNQISVAFDVDIHPAAKIGHGIMFDHATGIVVGETSVIENDVSILQGVTLGGTGKESGDRHPKVREGVMIGAGAKILGNIEVGKYAKIGANSVVLNPVPEYATAAGVPARIVSQDKAAKPAFDMNQYFIGIDDGMNLNI

SEQ ID NO: 1259 - DNA, 816 bp, Haemophilus influenzae
atgatcaacaaagatacccaactctgtatgtctttatcgggtcttccaggcaatttcggtactacctttcacaattatttgtacgacaagctaggattgaatttcatttataaagcattcaccacgcaagatattgagcacgccatcaaaggcgttcgcgcattaggcatccgtggttgtgctgtttcaatgccattcaaagaaacttgtatgccatttttagatgaaattcatccgtcagcacaagctattgaatccctaaataccatcgtgaacgataatggctttttgcgtgcatataacactgattacattgccatcgtaaaattaattgaaaaatatcatttaaataaaaatgctaaagtcattgttcatggcagtggcggtatggcaaaagccgttgtggtcgcctttaaaaattcaggttttgagaagttaaaaatttacgcacgcaacgtaaaaacaggtcaatatctcgccgcactttatggctacgcatacatcaattctttagaaaaccaacaggcagatattttagtcaatgttacgccaatcggcatgaaaggcggcaaggaagaaatggatttagcctttccaaaagcgttcattgataatgctagtgtcgcgtttgatgtagtggctatgcctgttgaaacgccctttattcgttatgctcaagcacgaggaaaacaaactatttctggcgcagaagtgattgtacttcaggctgtagaacaatttgaactttatacgcatcaacgcccaagcgatgaattaatcgctgaagctgcggcgtttgctcgaacaaaattttga

SEQ ID NO: 1260 - protein, 271 aa, Haemophilus influenzae
MINKDTQLCMSLSGLPGNFGTTFHNYLYDKLGLNFIYKAFTTQDIEHAIKGVRALGIRGCAVSMPFKETCMPFLDEIHPSAQAIESLNTIVNDNGFLRAYNTDYIAIVKLIEKYHLNKNAKVIVHGSGGMAKAVVVAFKNSGFEKLKIYARNVKTGQYLAALYGYAYINSLENQQADILVNVTPIGMKGGKEEMDLAFPKAFIDNASVAFDVVAMPVETPFIRYAQARGKQTISGAEVIVLQAVEQFELYTHQRPSDELIAEAAAFARTKF

SEQ ID NO: 1261 - DNA, 1386 bp, Haemophilus influenzae
atgggtgagatggcatctttaagaagtcataaaaatggcattatttttattttagatattgtgctgttttttgtgttattaaatgtattaccttttgaaccaaaagctaattctggtttggcattattagcttttatcgcggtgctttggttaagtgaagcattacacgttactattactgcattattagttccacttttggctgtggcattgggattagttagcaccaaacaagctttagttggttttgctgatccgacaatatttttattttttggtggcttttccttggcgacggcattgcatattcaaaaacttgataaattgattgccaataagattatggcactagcacgcggtaatttatttattgcagttatttatctctttttgattacagcctttctttctatgtggatgagtaacacggcaactgctgcaatgatgttacccctcgccatgggtattttaagccagcttgatcgcgaaaaagatcataacacctatgtgtttgtgctgttagggattgcttacagtgcatcaattggtggtatgggaacccttgtaggaagcccaccaaatgcaattgtagcaagtaatttaaatttaactttttctgattggttatggtatggcttaccaataatgattattttgttgccgttgatgattgggattctttatattattttcaaaccaaaacttcatctcaattttgaacagacctttgaaaatattgaaatgaatcctatgcgtatattgacgtttattattttttcagtcattgctttaacgtggatatttagcggtaaaattaatccgtttatttcaggattactaggattacaaaaaaacattgcaagttttgatagtatcgtagccttattggcggcaattgttatttgttcaacaggcgttgcaagttggaaacaaattcaatcaaataccgattggggcgtattaatgcttttcggtggtggattaacattaagtgcggtgttgaaggattctggtgcaagtaaaattttagcggatagtattgtttttatgattgatggacaacatttctatcttattggtttattagttgcggcgttcattattttcttaactgaatttacttctaatacagcgagtgcggcgttacttgtacctatctttatttctatcgctcaatcattgggtatgccagaaattggtttagcattaattattggtattggtgcatcctgtgcctttatgctaccagtagcgacaccaccaaatgcgattgtatttggctctggtcaagtaaaacaaagtgaaatggtcaaagttggtttcttactgaatttagtctgtgttgtagttattgccactatgggttatatgttctggcttaaataa

SEQ ID NO: 1262 - protein, 461 aa, Haemophilus influenzae
MGEMASLRSHKNGIIFILDIVLFFVLLNVLPFEPKANSGLALLAFIAVLWLSEALHVTITALLVPLLAVALGLVSTKQALVGFADPTIFLFFGGFSLATALHIQKLDKLIANKIMALARGNLFIAVIYLFLITAFLSMWMSNTATAAMMLPLAMGILSQLDREKDHNTYVFVLLGIAYSASIGGMGTLVGSPPNAIVASNLNLTFSDWLWYGLPIMIILLPLMIGILYIIFKPKLHLNFEQTFENIEMNPMRILTFIIFSVIALTWIFSGKINPFISGLLGLQKNIASFDSIVALLAAIVICSTGVASWKQIQSNTDWGVLMLFGGGLTLSAVLKDSGASKILADSIVFMIDGQHFYLIGLLVAAFIIFLTEFTSNTASAALLVPIFISIAQSLGMPEIGLALIIGIGASCAFMLPVATPPNAIVFGSGQVKQSEMVKVGFLLNLVCVVVIATMGYMFWLK

SEQ ID NO: 1263 - DNA, 849 bp, Haemophilus influenzae
atggccgcaaaaatcatctctggtactgaactttcaaaacaaattaaagctaatttagcagataaaataacccattatattgaacaaggaaaacgcgctccaggacttgctgtaatcctcgttggtgctgatcctgcttcgcaaatttatgtgggcaataaacgtaaaagttgcgaggaagtcggtattctctctaaatcttatgacctccctgaaacaaccacgcaaaatgaattattagcgattattgaccaacttaacgcagataaaaatattgacggtattttggtgcaactccccttgccaaaacaaattaatgcggaagctattattgaacgtatcgatcctaaaaaagatgtagatggctttcatccttataatgttgggcggttatgccaacgtattccaactttacgtgcttgtacaccttatggtgtgatgaaactattagaaacaacgggtattgatttacactgcaagcacgcagtaattgtaggcgcatccaatattgtcggccgcccaatgtctttagaattattattagcaggggcaaccgtcacagtaacacatagattcactaaaaatttggaaaaccacgttcgccaagcagatatacttgtcgttgcggtaggtaaaccaaatttaatttctggcgattggatcaaagaaagtgcggtagtaattgatgttggaattaaccgtgtagatggaaaattagtaggcgatgtagagtttgataaagcagccgaaaaagcggcttacattacaccagtccctggtggcgttgggccaatgaccgttgcaatgttgatgagcaatacgctttatgcttatgaacacaataaatag

SEQ ID NO: 1264 - protein, 282 aa, Haemophilus influenzae
MAAKIISGTELSKQIKANLADKITHYIEQGKRAPGLAVILVGADPASQIYVGNKRKSCEEVGILSKSYDLPETTTQNELLAIIDQLNADKNIDGILVQLPLPKQINAEAIIERIDPKKDVDGFHPYNVGRLCQRIPTLRACTPYGVMKLLETTGIDLHCKHAVIVGASNIVGRPMSLELLLAGATVTVTHRFTKNLENHVRQADILVVAVGKPNLISGDWIKESAVVIDVGINRVDGKLVGDVEFDKAAEKAAYITPVPGGVGPMTVAMLMSNTLYAYEHNK

SEQ ID NO: 1265 - DNA, 1287 bp, Haemophilus influenzae
atgaacgccaaagttttagaaaagaaattcatcgtcccctttgtgcttattactagcttatttgctctttggggatttgccaacgacattaccaatccgatggttgcggtatttcaaacagtaatggaaattccagcctcagaagcggcattggtacaattagctttttatggaggatacggcacaatggctattcctgcggcattatttgccagtcgctatagctacaaagcggggattcttctggggcttgctctttatgcaataggtgcatttttattttggccagctgcgcaatatgaaatatttaatttctttttagtctccctttatattttaacctttgggctcgcttttttggaaaccactgccaatccttatattctcgcaatgggagatcctcaaacagctactcgacgtttaaatttcgcacaatcatttaatccacttggttcaattacaggtatgtttgttgcttcccagttagtcctaactaatcttgaatctgacaaacgtgatgctgcaggtaatttgattttccacaccctgtctgaagcagaaaaaatgagtattcgcacccatgatttagctgaaattcgcgatccttacatagcactcggttttgtcgtggttgcagtgtttattatcattggattgaaaaaaatgccagccgtaaaaatagaagaggccagacaaatcagctttaaaacagcagtaagtagactggcgcaaaaagccaaatatcgtgaaggcgtgatcgcacaagccttttacgtaggtgttcaaatcatgtgttggacatttatcgtacaatacgctgaacgtttaggttttactaaagctgaagggcaaaactttaacatcattgctatggctatttttattagcagtcgctttattagcacggcattaatgaaatatttaaaagcagaatttatgctgatgctctttgctattggtggttttttaagtattctcggagttatctttattgacggtgtatggggtctatactgcctaattttaacctcaggttttatgtctttaatgttccctaccatttatggtattgccctctatggcttaaaagaggaatcgacattaggagctgcaggtttagtaatggctattgtaggcggcgcattaatgccaccactacaaggaatgattattgaccaaggcgaagttatgggacttccagcagtaaatttctcctttatcctaccattaatctgttttgtagtaattgccatttatggctttagagcttggaaaatacttaaatag

SEQ ID NO: 1266 - protein, 428 aa, Haemophilus influenzae
MNAKVLEKKFIVPFVLITSLFALWGFANDITNPMVAVFQTVMEIPASEAALVQLAFYGGYGTMAIPAALFASRYSYKAGILLGLALYAIGAFLFWPAAQYEIFNFFLVSLYILTFGLAFLETTANPYILAMGDPQTATRRLNFAQSFNPLGSITGMFVASQLVLTNLESDKRDAAGNLIFHTLSEAEKMSIRTHDLAEIRDPYIALGFVVVAVFIIIGLKKMPAVKIEEARQISFKTAVSRLAQKAKYREGVIAQAFYVGVQIMCWTFIVQYAERLGFTKAEGQNFNIIAMAIFISSRFISTALMKYLKAEFMLMLFAIGGFLSILGVIFIDGVWGLYCLILTSGFMSLMFPTIYGIALYGLKEESTLGAAGLVMAIVGGALMPPLQGMIIDQGEVMGLPAVNFSFILPLICFVVIAIYGFRAWKILK

SEQ ID NO: 1267 - DNA, 651 bp, Haemophilus influenzae
atgaacagagcagaattatcacaaaaaatcattaatacttgccttgaaatgacaaaattaggtttaaatcaaggcacagcgggaaacgttagtgttcgttataaagatggaatgctgattaccccgacaggtatgccatatcacttaatgaagacagaaaatattgtttatgttgatggaaatggcaaacacgaagaaaataaattaccatcaagcgaatggcaatttcacttgagtgtttatcatactcgccctgaagcaaatgccgttgtccacaatcattccattcactgtgcaggcttatccattctcgaaaaacctattcctgcaattcattacatggtagccgtaagcggcacagatcatattccttgtgtaccttatgcaacatttggtagtcacgaattagctagttatgtcgcaacgggaatcaaagaaagcaaagccattttactagcacaccatggtttaatcacttgcggagaaaacctagataaagccttatggctcgcacaagaagtagaagtattagcgtcttggtatttgaaattactctctacaggcttagaaattccactgctcagcaaagagcaaatgcaggtagtgttaggtaaattccacacctatggattacgtattgaagaatcctaa

SEQ ID NO: 1268 - protein, 216 aa, Haemophilus influenzae
MNRAELSQKIINTCLEMTKLGLNQGTAGNVSVRYKDGMLITPTGMPYHLMKTENIVYVDGNGKHEENKLPSSEWQFHLSVYHTRPEANAVVHNHSIHCAGLSILEKPIPAIHYMVAVSGTDHIPCVPYATFGSHELASYVATGIKESKAILLAHHGLITCGENLDKALWLAQEVEVLASWYLKLLSTGLEIPLLSKEQMQVVLGKFHTYGLRIEES

SEQ ID NO: 1269 - DNA, 435 bp, Haemophilus influenzae
atgctaaaaggtattcacccagctctttctcctgaattactaaaaaccctcgccgaaatggggcatggcgatgagatagttctagctgacgcccattttcccgcacattcactacataaaaatgtaatacgtgcagatggtatatctatagatattttacttgaagcaataactcccttattcgaatttgacgcttatgttgatgcccctctgttgatgatgaaagcagttgagggagattctttagatccgaatgttgaaactcgttacttaaatgcgattgaaagtgcggtcggtttcacaccaaatttaacctgtctagaacgcttcgatttttatacccgtgctaaacaggcttatgctgttgttgtcagtggtgagatcgcaaaatatggcaacattatcattaaaaaaggggttactcccattttataa

SEQ ID NO: 1270 - protein, 144 aa, Haemophilus influenzae
MLKGIHPALSPELLKTLAEMGHGDEIVLADAHFPAHSLHKNVIRADGISIDILLEAITPLFEFDAYVDAPLLMMKAVEGDSLDPNVETRYLNAIESAVGFTPNLTCLERFDFYTRAKQAYAVVVSGEIAKYGNIIIKKGVTPIL

SEQ ID NO: 1271 - DNA, 1413 bp, Haemophilus influenzae
atggctatcgcattgatttttgactgtggcgcaacaaatttacgcaccattgcgataaatgaaaaaggacaaattcttgcctctcatcaccttgctaataatacaaaacaaggaatcgaatcatctgattatcatatttgggatattgaagaaatctggcaaaaattaacctcttgtgcaactcaaaccttcaatcaattaatgcaacaaggtattgatttaaaagatattgtaggaatatctgttaccactttcggcgtggatggcgcaccttttgatgaaaatgatcaacaactttatccgattatttcatggaaatgcccacgaaccataccagtaatggaaaatctatctaatcaattagatatcaaatatctttatcaacgtaacggcattggtcaatacagttttaatactttatttaaattacattggttaaaaacacacaggccagatgttttccaaaaaatggctaaattcgtttttatttcgtcaatgctcactgaacgcttaactggtcaattcactacagatcacacaatggcgggaacatcaatgatgacaaaccttactagcggtaattgggatccatcgattttaacatcgctgggtttaagtaataaccatttccctcctatgcgttatgcaggtgaaaaagttggaaaattacgtacaccgttagcccagaaatggggattaaatcccgtacctgtcatttcttgtggacatgatactcaatttgctgtgtttgggtctggtgcagggctaaatcagcctgtgttaagttctggcacctgggaaatcttaatggctagaacccagcacgcagaacctagatttgagtttgtttctcaaggcttaaccactgaatttgatgcacaatccaattgctttaatccagcggtacaatgggtgggttctggcgtcatagaatggttaggtaaattattattttccgatgtttatggcagcgatcactattacaccacaatgatcaaagagggagaaaaagcttttaatgcgggaaaaagaacggtcaattttgaaggtatttttagccaactaggacaaggtaatatcagtggactttccatgtttgctactcgtggagaaatttatgtcagcgcattacaacatatggcaaataaactcaaaaacggtttatccgtgctacatcaagtcagtcagttccaagctaaaagcttaatttgtgttgggggtggttcaaaaaatgtattgtggaatcaaatccgtgcaaacaccttaaatttaccgattgatgttgtggacatttctgaaagtactgtacttggtgccgcaatgtttacctttgcaggcgtaggcatttacgaaaatgtaaacgcggcacagcaagcgatgcaaccaacaagaaaacgaatttacccaaactag

SEQ ID NO: 1272 - protein, 470 aa, Haemophilus influenzae
MAIALIFDCGATNLRTIAINEKGQILASHHLANNTKQGIESSDYHIWDIEEIWQKLTSCATQTFNQLMQQGIDLKDIVGISVTTFGVDGAPFDENDQQLYPIISWKCPRTIPVMENLSNQLDIKYLYQRNGIGQYSFNTLFKLHWLKTHRPDVFQKMAKFVFISSMLTERLTGQFTTDHTMAGTSMMTNLTSGNWDPSILTSLGLSNNHFPPMRYAGEKVGKLRTPLAQKWGLNPVPVISCGHDTQFAVFGSGAGLNQPVLSSGTWEILMARTQHAEPRFEFVSQGLTTEFDAQSNCFNPAVQWVGSGVIEWLGKLLFSDVYGSDHYYTTMIKEGEKAFNAGKRTVNFEGIFSQLGQGNISGLSMFATRGEIYVSALQHMANKLKNGLSVLHQVSQFQAKSLICVGGGSKNVLWNQIRANTLNLPIDVVDISESTVLGAAMFTFAGVGIYENVNAAQQAMQPTRKRIYPN

SEQ ID NO: 1273 - DNA, 1770 bp, Haemophilus influenzae
atggctcttgctactcaatcaaatcgtataaaaatcggtattcgtccaactattgatggtcgtcgaatgggggttcgagaatctcttgaaacccaaacaatacgtatggctcaatctgttgctcaattattacaaacacatattcgtcatacagatggtactttcgttgaatgtgtagttgcagatagcactatcggcggtgtagccgaagcagccgcctgtgcggataaatttaaacgcgaaaacgttggattaaccattaccgttaccccttgttggtgttatggctcagaaaccattgatatggatcctcacatgcctaaagcaatttggggatttaacggtacggaacgcccaggtgcggtttacttggctgccgcccttgctggtcattctcaattaggactaccagccttttccatttacggcacagaagttcaagaagccgatgacacaagcattcctgaagatgtaaaagaaaaattattgcgttttgctcgtgctggacttgctgttgcaagtattcgaggaaaatcctatttatctattgggtcagtttccatgggaattgcaggttctattgtaaatcaagctttcttccaagaatatttaggtatgcgtaatgaatatgtggatatgatggaaattaaacgccgtttagaccgcaaaatttatgatcaagaagaagttgatttagccttgagttgggttaaacaatattgcaaagaaggggttgatgtaaatagcctagagaatcaacgcaatgcggaagagcgtgcagaactttgggaaaatgttgtgaaaatgaccattatcactcgtgatttgatggtaggaaatccaaaattagcaacattaaattatgcagaagaagccttaggtcataatgccattgcagcaggttttcaagggcagcgtcattggactgatcatttgccaaacggcgattttatggaggcaatgctcaattcaacttatgactggaatggcgtgcgtccaccttatattcttgccacggaaaatgatagtttaaatgcaataggaatgttatttgggcatcaattaactggcaaagctcaaattttcgcagatgtgcgtacttattggagtcaagattcggttgagcgtgtcactggatggcgacctgaaagtggattcattcatttaatcaattcaggttcagctgcacttgatggaacgggagaacatcaagatgctcaaggcaatccaactttaaaaccagcatgggatgttaccgaagaagaagcaaaacgctgcttagaaaatacacgttggtgtcctgctgttcacgaatattttcgagggggcggtttatcttctcaattcctaaccaaaggtggcataccgtttacaatgcaccgtattaatcttattaaaggtttaggtcccgttttacaaattgcggaaggctggtcaatcgacttacctcaagatgtacataataaattaaatcaacgtactaatgaaacttggccaacaacatggtttgttccacgtttaactggaaaaggtgcatttactgatgtgtattcagtcatggcaaattggggcgcaaatcactgtgtagcgactcacggtcatgtgggggctgatctaatcactcttgcttcaatgttacgcattccagtctgtatgcataatgtatcagagaaaaatattttccgccctagcgcttggaatggatttggtcaagacaaggaagggcaagattatcgtgcctgccaaaactttggtccgctttataaataa

SEQ ID NO: 1274 - protein, 589 aa, Haemophilus influenzae
MALATQSNRIKIGIRPTIDGRRMGVRESLETQTIRMAQSVAQLLQTHIRHTDGTFVECVVADSTIGGVAEAAACADKFKRENVGLTITVTPCWCYGSETIDMDPHMPKAIWGFNGTERPGAVYLAAALAGHSQLGLPAFSIYGTEVQEADDTSIPEDVKEKLLRFARAGLAVASIRGKSYLSIGSVSMGIAGSIVNQAFFQEYLGMRNEYVDMMEIKRRLDRKIYDQEEVDLALSWVKQYCKEGVDVNSLENQRNAEERAELWENVVKMTIITRDLMVGNPKLATLNYAEEALGHNAIAAGFQGQRHWTDHLPNGDFMEAMLNSTYDWNGVRPPYILATENDSLNAIGMLFGHQLTGKAQIFADVRTYWSQDSVERVTGWRPESGFIHLINSGSAALDGTGEHQDAQGNPTLKPAWDVTEEEAKRCLENTRWCPAVHEYFRGGGLSSQFLTKGGIPFTMHRINLIKGLGPVLQIAEGWSIDLPQDVHNKLNQRTNETWPTTWFVPRLTGKGAFTDVYSVMANWGANHCVATHGHVGADLITLASMLRIPVCMHNVSEKNIFRPSAWNGFGQDKEGQDYRACQNFGPLYK

SEQ ID NO: 1275 - DNA, 750 bp, Haemophilus influenzae
atgaattatcgtgatgaattaattttacaatgggtaaatcaacaaggaaaagccagcgtaatagaacttgcacagcattgtgatatttcggtggaaaccattcgtcgcgatttgaacaaattagcgaacaaaggcttattgcaccgaacccacggaggagcagtgagtaataaaaccaaagatttaggttcatttttccaaactcgaaaacatattaatgcaacagctaaacgacatattgcccaaaaagccttggatttgctatatgaaaatgccgttataggtttagatgcaagctcaacaagctggtattttgcttatttaatgcccgatattccttgtacagtagtaaccaattcaatgtttaacattaatgccctagttaataaatccaatgttaaaactattgttactggcggagtttattcagcaaaatatgaagcattttacggtcccttatctgagtacttattacaacgattacatattaatttttcagtgttttcttgttcaggaattgataaaaacggtaatatctgggaatcaaacgagctgaatgcctctttaaaacgaaaaatgatggaagcttcagaacgtgcttatttgttaattgattcttctaaatttgaaaaaacaagtttgattcaacttgccgatttaagcaaaattaataccattttttctgatcggtcacttcccgataacttacaaaaatattgtgagcaacacgatataatgaccgttttataa

SEQ ID NO: 1276 - protein, 249 aa, Haemophilus influenzae
MNYRDELILQWVNQQGKASVIELAQHCDISVETIRRDLNKLANKGLLHRTHGGAVSNKTKDLGSFFQTRKHINATAKRHIAQKALDLLYENAVIGLDASSTSWYFAYLMPDIPCTVVTNSMFNINALVNKSNVKTIVTGGVYSAKYEAFYGPLSEYLLQRLHINFSVFSCSGIDKNGNIWESNELNASLKRKMMEASERAYLLIDSSKFEKTSLIQLADLSKINTIFSDRSLPDNLQKYCEQHDIMTVL

SEQ ID NO: 1277 - DNA, 2772 bp, Haemophilus influenzae
atgccctttgctattggtcagcgttggttaagtgaaagtgaaaacgctttaggattaggtgttattaccgcattagatcaacgaaccgtcacgatttatttccctgctgcggatgaaacgcggatatatgctactgcacaagcgcctttaagccgaattgtatttagtaaaggtgaaaccttatcccatcaagctggctggcaaggcgagattttagacgttcaaaatatgaacggtttgttgttttatttagttaaaaatccacaagatgaagatgttattgtgcaagaacgtgatatttcgccgattatttcttttagtcaagcgaaagatcgcctcttttcagcacaaattgatcgcagcactcattttgcattgcgttatcgcacgctttgtcatcagcaagcacaatttaaatcgccattgcgtggtttacgcggaacgcgtgcaagtttaattccccatcagcttcatattgcagctgaagtcggtaatcgagttaatcctcgcgtgttattggcggatgaggttggtttagggaaaaccattgaagcaggaatgattttgcagaatcaactttttgctgagaaagtgcaacgtgttcttattatcgtgccagaaaccttgcaacatcaatggctggtggaaatgcttcgtcgttttaatttgcattttgcactttttgatgaagaacgttgcaacgattttgatcttgatgccgttaatccattcacgactgaaagtttaattatctgttcgctgaattggttagaaactcatccaaaccgagtggagcaggcgctcaatgctcaatttgactgtttaattgtggacgaagcccatcatttggtgtggtctgaaacctcgccaagtgcagcttatttattagttgaacagcttgctcgtatcattccatccgtcttgttactcactgcaactccagagcaacttgggcaagaaagtcattttgctcgtttgcgcttactggatccagaacgtttctttgattatcaaacctttgtgaaagagcaggaacgctatcaacctgtggttaatgccgttgaatctttgttggcaaataaggcattaagtgcggtcgaaaaaaatcatatttctgatttattgcttgaacaagatgtcgagccactttttaaagcaattgcatcaaataatgatgaagaacaacagcgtgcccgtcaggaattgattcaagccttaattgatcgtcacggcacggggcgaatgttattccgcaatacacgtcaaggggtgaaaggttttccgcaccgtgtttatcatcaaattactctctctgaagagaatgataaaattgattggctgattgacttcctcaaactacatcgcaatgaaaaaatctttgtgatttgccagacggcggcaactgcgattcagttagaacaaattttacgtgaacgtgaggcgattcgcgccgcagtgtttcacgaaaaaatgtcgattatcgaacgggatagagccgcggcttattttgcggatttagaaaacggcgcgcaggttttactgagctcgagtattggctcggaagggcgtaatttccaattcgcagcaaatttagtgttatttgatttaccgacaaatcctgatttattggaacaatgtattggccgattagatcgtattggacaaaaacgtgatgtgcaaatttatgtgccttgtgcgaaagattcgcctcaaagtcgtttagcacgttggtacaatgagggattgaatgcttttgaacaaacttgtccaatgggaatggcattattttctcagtttgccgatgagttggaaaaagtgcggtcaaattctaccgcactttcagagaatgaattttctggattattaaaacaaactaaaaccgcacgggaaaaactcaagattgagttagaaaaaggtcgcgatcgtttattagagctaaattctcatggcggtgagcaagcacaagcattagcggatcaaattgctgatgaagataattcgccagagcttgtgaattttgctttaaaattatttgatattattggcgtagagcaagaagatcttggggctaatagtattgtaattagtccaactgggacaatgcttgtgcccgattttccaggtttaaaagaagaaggtgtgacggttacctttgatcgcgaacttgcccttgcccgcgaagaaatggaattcttgacttgggatcatcctatgattcgtcaaggtattgatcttgttgcttcgggtgatattggcaaagccgcaatggcattgcttgtgaataaacaactgcccgctggaaccttattaattgaattgatttatgtggtggaaagccaatcgccaaaaggattacagctcaatcgtttcttgccgccaacgcctattcgtctgctgcttgataacaaaggaaataacatgggtgagcaggttgcctttgaaaccttgcatagcaaattgaaaccacttggtaaaaatattgctaatcaaatggtgaaaatggcacgtgccaatattgaagtcttgattacacaaggcgatcaactcgtaaaatctttagctgaaccgattattgctgaagctaaaaatcaagcagatcaacaattaagcgcagaaattaatcgtttacaggctttgcgagcagtgaataaaaatattcgccagagcgaaattgatattttggaacaacaacgaacacaatcactggacgagctttctaaagcaaattggcgtttggattgcttgcgtgtcattgtgacgaacaaggaataa

SEQ ID NO: 1278 - protein, 923 aa, Haemophilus influenzae
MPFAIGQRWLSESENALGLGVITALDQRTVTIYFPAADETRIYATAQAPLSRIVFSKGETLSHQAGWQGEILDVQNMNGLLFYLVKNPQDEDVIVQERDISPIISFSQAKDRLFSAQIDRSTHFALRYRTLCHQQAQFKSPLRGLRGTRASLIPHQLHIAAEVGNRVNPRVLLADEVGLGKTIEAGMILQNQLFAEKVQRVLIIVPETLQHQWLVEMLRRFNLHFALFDEERCNDFDLDAVNPFTTESLIICSLNWLETHPNRVEQALNAQFDCLIVDEAHHLVWSETSPSAAYLLVEQLARIIPSVLLLTATPEQLGQESHFARLRLLDPERFFDYQTFVKEQERYQPVVNAVESLLANKALSAVEKNHISDLLLEQDVEPLFKAIASNNDEEQQRARQELIQALIDRHGTGRMLFRNTRQGVKGFPHRVYHQITLSEENDKIDWLIDFLKLHRNEKIFVICQTAATAIQLEQILREREAIRAAVFHEKMSIIERDRAAAYFADLENGAQVLLSSSIGSEGRNFQFAANLVLFDLPTNPDLLEQCIGRLDRIGQKRDVQIYVPCAKDSPQSRLARWYNEGLNAFEQTCPMGMALFSQFADELEKVRSNSTALSENEFSGLLKQTKTAREKLKIELEKGRDRLLELNSHGGEQAQALADQIADEDNSPELVNFALKLFDIIGVEQEDLGANSIVISPTGTMLVPDFPGLKEEGVTVTFDRELALAREEMEFLTWDHPMIRQGIDLVASGDIGKAAMALLVNKQLPAGTLLIELIYVVESQSPKGLQLNRFLPPTPIRLLLDNKGNNMGEQVAFETLHSKLKPLGKNIANQMVKMARANIEVLITQGDQLVKSLAEPIIAEAKNQADQQLSAEINRLQALRAVNKNIRQSEIDILEQQRTQSLDELSKANWRLDCLRVIVTNKE

SEQ ID NO: 1279 - DNA, 660 bp, Haemophilus influenzae
atggcattgattgaatacaatccgccccttgaaccttatttggatattatttatcaagataatcatttgtgcgtggtaaacaaaccgagcggtttgctttccgtaccaggcaatcaaccacaatattacgatagcgcaatgagtcgagtaaaagaaaaattcggcttttgtgagcctgctcatcgtttggatatggcaacgagtggtattattgtgtttgctttaagtaaggcggcggatcgtgaattaaaacgtcaatttcgcgaacgtgaaccgaaaaaacattatcaagcgattgtttgggggcatttggagaacgattatggcgaggtaaatttgccgatgatttgtgattgggaaaatcgacctcgccaacgtttggatttcgttttaggaaaaagagcggtcacaaaattcgaagttttagcacgtttgccgaataacagtactcgcgtgaaactgacgcccgtgacaggcagatctcatcaattacgcttgcacatgttagcattggggcatccaattctaggcgataaattttattctcatccacaggctaaagctatgtcgtcaagattatgtttgcacgcagaagaattgacgattacccaccccattacaggggaaacaatgacttttaatgcgaagtccgatttttaa

SEQ ID NO: 1280 - protein, 219 aa, Haemophilus influenzae
MALIEYNPPLEPYLDIIYQDNHLCVVNKPSGLLSVPGNQPQYYDSAMSRVKEKFGFCEPAHRLDMATSGIIVFALSKAADRELKRQFREREPKKHYQAIVWGHLENDYGEVNLPMICDWENRPRQRLDFVLGKRAVTKFEVLARLPNNSTRVKLTPVTGRSHQLRLHMLALGHPILGDKFYSHPQAKAMSSRLCLHAEELTITHPITGETMTFNAKSDF

SEQ ID NO: 1281 - DNA, 579 bp, Haemophilus influenzae
atgaaaaactttttagctcaacaaggaaagatcacgttaattcttaccgcactttgtgcgcttatttatcttgctcaacagctggggtttgaagacgatattatgtatttgatgcattacccagcttacgaagagcaagatagcgaagcgtggcgttatatttcacatacactggtacatttatctaatttgcatattttgtttaatctgtcttggttttttattttcggtggaatgattgagcgcacttttggttcggtcaaattattgatgttgtatgttgtagcatctgccataacaggctatgtgcaaaattatgtgtctggccccgctttttttgggctttctggtgttgtatatgcggttctaggttatgtatttatacgtgataaattgaatcatcatttatttgatctgccagaaggttttttcacaatgttattggtggggatcgcattaggttttattagccccttatttggtgttgaaatgggaaatgcagcgcatatatcaggcttgattgttggcttgatttggggatttattgatagcaaattgtgcaaaaattcgctagagtaa

SEQ ID NO: 1282 - protein, 192 aa, Haemophilus influenzae
MKNFLAQQGKITLILTALCALIYLAQQLGFEDDIMYLMHYPAYEEQDSEAWRYISHTLVHLSNLHILFNLSWFFIFGGMIERTFGSVKLLMLYVVASAITGYVQNYVSGPAFFGLSGVVYAVLGYVFIRDKLNHHLFDLPEGFFTMLLVGIALGFISPLFGVEMGNAAHISGLIVGLIWGFIDSKLCKNSLE

SEQ ID NO: 1283 - DNA, 768 bp, Haemophilus influenzae
atgaaacaatcgttacgccatcaaaaaattattaaactggtgggacaatctggctatttaagcacggaagaattggttactgccttagatgttagccctcaaacgattcgccgtgatttgaatattttggcggagttagatttaattcgtcgccatcacggcggtgcggcatcgccatcttctgcagaaaattctgattacgtggatcgtaagcaattcttttcattacaaaaaaataatattgcgcaggaagtcgcaaagttgattcctaacggcgcatctttgtttattgatattggtaccacgcctgaggctgtcgccaatgcattgcttggtcacaaaaaactccgaattgtgacgaacaatctgaatgccgctcatcttttatgccaaaatgaaagttttgatattgttatggcgggcggatcattgcgaatggatggtggaattatcggcgaagctacggtgaattttatttctcaatttcgcctagatttcgggattttagggattagcgcgatcgatgctgatggttcattattggattatgattaccatgaagtacaagtaaagcgagcgattattgaaagttcacgtcagaccttattagtgaccgatcgctctaaatttacgcgccaagcaattgttcgattgggcgaattaagtgatgtggaatatttgtttacggatgatgttcccgaaggaattgctaattatctgaaagctcagaaaacaaaattggtgttatgtaatggtaaagtgcggtaa

SEQ ID NO: 1284 - protein, 255 aa, Haemophilus influenzae
MKQSLRHQKIIKLVGQSGYLSTEELVTALDVSPQTIRRDLNILAELDLIRRHHGGAASPSSAENSDYVDRKQFFSLQKNNIAQEVAKLIPNGASLFIDIGTTPEAVANALLGHKKLRIVTNNLNAAHLLCQNESFDIVMAGGSLRMDGGIIGEATVNFISQFRLDFGILGISAIDADGSLLDYDYHEVQVKRAIIESSRQTLLVTDRSKFTRQAIVRLGELSDVEYLFTDDVPEGIANYLKAQKTKLVLCNGKVR

SEQ ID NO: 1285 - DNA, 822 bp, Haemophilus influenzae
atgaaattaaaacaactttttgcaatcactgcaatcgcatcagctctcgttttaacaggctgtaaagaagacaaaaaacctgaagctgcagcagcaccgcttaaaatcaaagtaggcgtgatgtctggccctgagcatcaagttgcagaaattgcagcaaaagtcgctaaagaaaaatatggtttagacgttcaattcgttgaattcaatgactacgcattaccaaatgaagctgtatctaaaggtgatttagatgcaaacgcaatgcaacataaaccttatttagatgaagatgcaaaagcgaaaaatttaaataacttagttatcgtgggtaatactttcgtctatccattagcgggttattctaaaaaaatcaaaaatgtgaatgaattacaagacggtgctaaagttgttgttcctaacgatccaacaaaccgtggccgtgcattaattcttcttgagaaacaaggtttaatcaaattaaaagatgcaaataaccttctttcaactgtattagatattgttgaaaatccgaaaaaattaaacatcactgaagtagatacttctgttgcggcacgcgcattagacgacgttgatttagctgtagtaaacaatacttatgcgggtcaagtaggcttaaatgctcaagatgacggtgtatttgtagaagataaagattcgccatatgtgaacattatcgtttctcgtaccgataacaaagacagcaaagctgttcaagatttcgtaaaatcttaccaaacagaagaagtttaccaagaagctcaaaaacactttaaagatggtgttgtaaaaggttggtaa

SEQ ID NO: 1286 - protein, 273 aa, Haemophilus influenzae
MKLKQLFAITAIASALVLTGCKEDKKPEAAAAPLKIKVGVMSGPEHQVAEIAAKVAKEKYGLDVQFVEFNDYALPNEAVSKGDLDANAMQHKPYLDEDAKAKNLNNLVIVGNTFVYPLAGYSKKIKNVNELQDGAKVVVPNDPTNRGRALILLEKQGLIKLKDANNLLSTVLDIVENPKKLNITEVDTSVAARALDDVDLAVVNNTYAGQVGLNAQDDGVFVEDKDSPYVNIIVSRTDNKDSKAVQDFVKSYQTEEVYQEAQKHFKDGVVKGW

SEQ ID NO: 1287 - DNA, 690 bp, Haemophilus influenzae
atgttcaatgattttttggcaacattcagccaacaattaacacctcaaatgtggggtgttgtcgcaaccgcaacttatgaaactgtctatatcagttttgcatctaccctacttgctgtactagtcggcgtgcctgtgggtgtatggacgttcttaactggaaaaaatgagatcttacaaaataaccgcactcattttgtgttaaacacgattattaatattgggcgttccattccatttattattttgcttctaatcttattacctgtaactcgtttcatcgtgggaaccgtattaggtacaacagcagcaattattccattgagtatttgtgcaatgccattcgtggctcgcttaactgctaatgcattaatggaaattccaaatggtttaaccgaagctgctcaagcaatgggggctactaaatggcaaattgtacgtaaattctatttaccagaagcactacctacactcattaatggcatcacgctcactctagtcactttagttggttactcagcaatggcggggacgcaaggcggcggtggtttaggtagcctcgctatcaactacggcgtatatcgcaatatgccttatgtcacttgggtggcaaccattattattgtgctattcgttatgattagccaaaaactcggcgatacactggctaaaaaagtggatcatcgttaa

SEQ ID NO: 1288 - protein, 229 aa, Haemophilus influenzae
MFNDFLATFSQQLTPQMWGVVATATYETVYISFASTLLAVLVGVPVGVWTFLTGKNEILQNNRTHFVLNTIINIGRSIPFIILLLILLPVTRFIVGTVLGTTAAIIPLSICAMPFVARLTANALMEIPNGLTEAAQAMGATKWQIVRKFYLPEALPTLINGITLTLVTLVGYSAMAGTQGGGGLGSLAINYGVYRNMPYVTWVATIIIVLFVMISQKLGDTLAKKVDHR

SEQ ID NO: 1289 - DNA, 1038 bp, Haemophilus influenzae
atgattaagctaaataatattacgaaaatttttgcgctaccgaacaaaaaattgactgcgcttgataatgtttcgttgaatatcgaaaaaggtcaaatctgtggcgtaattggtgcatctggtgcaggaaaaagtacattaattcgctgtgtgaacttattagaaaaaccgacaagcggttccgttattgttgatggcgtagaattaacaaaactttctgatcgcgagttagtacttgctcgtcgtcaaattggaatgatttttcagcatttcaatttactaagttctcgcaccgtctttgaaaacgtggcattatccttagaattagaaggtgaaccaaaagcaaaaatccaagaaaaaattaccgcacttttagagcttgttggtttaagtgaaaaacgtgatgcttacccaagcaatctttcgggtgggcaaaaacaacgcgtagccattgctcgcgccttagcgagcgatcctaaagtcttattatgtgatgaagcaacgagcgcattagatcctgcaacgacgcaatctattctgaaattattaaaagaaattaaccgcactttaggtattacaattttgttgattactcatgaaatggaagttgttaaacagatttgtgatcaagttgctgttattgatcaaggtcgcctagttgaacaaggtactgtcggtgaaatttttgcaaaccctaaaacagaattagcacaagagtttattcgttcgaccttccacatcagtctacctgatgaatatttggaaaatcttactgatacaccgaaacacagcaaagcgtatccaatcatcaaatttgagtttacgggtcgctcagtcgatgcaccgttactttctcaagcatcaaaaaaatttggcgtggagctcagtatcttaacctcacaaattgattatgctggaggcgtgaaatttggttataccattgctgaagtagaaggcgatgaagatgccattacgcaaaccaaagtttatttaatggaaaacaacgtgcgcgtggaggtgcttggttatgttcaatga

SEQ ID NO: 1290 - protein, 345 aa, Haemophilus influenzae
MIKLNNITKIFALPNKKLTALDNVSLNIEKGQICGVIGASGAGKSTLIRCVNLLEKPTSGSVIVDGVELTKLSDRELVLARRQIGMIFQHFNLLSSRTVFENVALSLELEGEPKAKIQEKITALLELVGLSEKRDAYPSNLSGGQKQRVAIARALASDPKVLLCDEATSALDPATTQSILKLLKEINRTLGITILLITHEMEVVKQICDQVAVIDQGRLVEQGTVGEIFANPKTELAQEFIRSTFHISLPDEYLENLTDTPKHSKAYPIIKFEFTGRSVDAPLLSQASKKFGVELSILTSQIDYAGGVKFGYTIAEVEGDEDAITQTKVYLMENNVRVEVLGYVQ

SEQ ID NO: 1291 - DNA, 555 bp, Haemophilus influenzae
atgaataaggctatttttttagatcgcgatggcacgttaaatattgattatggttatgtacacgaaattgataactttaaatttattgatggtgcgattgatgcattgcgagaattaaagaaaatgggatatatattggtattagtgaccaaccagtcgggcattgcacgtggttatttttctgaggagcagtttttacaattaacagaatggatggattggtcgttagctgaacaagatgtggatttggatggtatttactattgtccacatcatcctgagggaaagggcgaatataaagaagattgtgattgtcggaagcctaaatcgggaatgttattgcaagcgatcaaagaattaaagatcgatcctaggcaatctattatggttggagataaagttgaagacctaaaagcggggattggtgcgaaggtaaaaatgaacgtattagttcgtactggtaaaccagtaacaggggaaggagaaggaatagcggattatgtgttagattctatcgtagatcttccgagaattttaaagtgcttaaaaaaatag

SEQ ID NO: 1292 - protein, 184 aa, Haemophilus influenzae
MNKAIFLDRDGTLNIDYGYVHEIDNFKFIDGAIDALRELKKMGYILVLVTNQSGIARGYFSEEQFLQLTEWMDWSLAEQDVDLDGIYYCPHHPEGKGEYKEDCDCRKPKSGMLLQAIKELKIDPRQSIMVGDKVEDLKAGIGAKVKMNVLVRTGKPVTGEGEGIADYVLDSIVDLPRILKCLKK

SEQ ID NO: 1293 - DNA, 510 bp, Haemophilus influenzae
atgaccgcacttaatgtattaatttatcctgatgatcacttaaaggttgtctgtgagcctgttactgaagttaatgatgcaattcgtaaaattgttgatgatatgtttgatacgatgtatcaagagaaaggtattggtttagctgcacctcaggtggatattttgcaacgtattattactattgatgttgaaggcgataaacagaatcagtttgttttgattaaccctgaaattttggcttcagaaggcgaaacgggaattgaagaggggtgtttatccattccagggttccgtgcgttggttcctcgtaaagaaaaagtgacagtgagagcgttagatcgtgatggtaaagaatttactttagatgctgatggtttgcttgcgatctgtattcaacacgagatcgatcatcttaatggaattttatttgttgattacctttctccacttaaacgccagcgcattaaagaaaagttgattaaatacaagaagcagatttcgaaaagctaa

SEQ ID NO: 1294 - protein, 169 aa, Haemophilus influenzae
MTALNVLIYPDDHLKVVCEPVTEVNDAIRKIVDDMFDTMYQEKGIGLAAPQVDILQRIITIDVEGDKQNQFVLINPEILASEGETGIEEGCLSIPGFRALVPRKEKVTVRALDRDGKEFTLDADGLLAICIQHEIDHLNGILFVDYLSPLKRQRIKEKLIKYKKQISKS

SEQ ID NO: 1295 - DNA, 957 bp, Haemophilus influenzae
atgaaatcacttaatattatttttgctggtacgccagattttgctgcacagcatttacaagccattctaaattctcaacataacgtgatcgctgtttatactcaacctgataaaccagctggtcgcggtaagaaattgcaagcaagtcctgtaaagcaacttgctgagcaaaataacatccgcgtttatcaacctaaatccttacgtaaagaagaagcgcagtctgaactaaaagcgttaaatgcagatgtaatggttgttgtggcttatggattaattttaccgaaagctgtattagatgcccctcgtttgggttgtttgaatgtgcatggttctattcttccacgttggcgaggtgcagcaccaattcagcgttcaatttgggctggcgatgtacaaacgggtgtaaccattatgcaaatggatgaaggtttagatacaggcgatatgttacataaagtctattgtgatattttaccgactgaaacttcaacgagtctttataacaaactggcagagcttgctacatcagcattaatcgatgttttagataatcttgaaaacagtaaatttatagcggaaaaacaagatggcaaccaaagtaattatgcagaaaaactttccaaagaagaggctcaattagattggtcacttcctgcaatgcaacttgagcgtaatatccgcgcttttaatccttggccaattgcctatttttcaacagaagacaaggatggcaatgcacaaactttaaaagtgtatcaagcggaagtgttgcctcatcaagataaaccagcgggaactattttaagtgcggataaaaatggcattcaaattgcgactgtcgatggcgtcttaaacttattgcaattgcaacctgcaggtaaaaagcttatgtctgcacaagatttattaaatggccgtgcagaatggtttactattggtaaggtgcttgcataa

SEQ ID NO: 1296 - protein, 318 aa, Haemophilus influenzae
MKSLNIIFAGTPDFAAQHLQAILNSQHNVIAVYTQPDKPAGRGKKLQASPVKQLAEQNNIRVYQPKSLRKEEAQSELKALNADVMVVVAYGLILPKAVLDAPRLGCLNVHGSILPRWRGAAPIQRSIWAGDVQTGVTIMQMDEGLDTGDMLHKVYCDILPTETSTSLYNKLAELATSALIDVLDNLENSKFIAEKQDGNQSNYAEKLSKEEAQLDWSLPAMQLERNIRAFNPWPIAYFSTEDKDGNAQTLKVYQAEVLPHQDKPAGTILSADKNGIQIATVDGVLNLLQLQPAGKKLMSAQDLLNGRAEWFTIGKVLA

SEQ ID NO: 1297 - DNA, 1353 bp, Haemophilus influenzae
atgaaaaaattttcttctaaaactatcaaagtaaaaaattcagtaaaaatgaccgcactttcgaccagggctatttcagcaaacttaattttgcaagtattggatgagggcaaatcattgtcagcgttaattccagaagtgcaactttctgtaaaagctcaagatttgcccttgctacaagaaatttgttttggcgtgtgtcgagtattgcctcgcttagagcaaattatcaaacgtgttgtggataagccgcttaaaggtaaaactcgcattgttcattgcctgttacttgtagggttataccaattgctttatatgcgagtgcctgttcatgcggcagttgatgaagttgtgaacgcaacaaaatcattaaaatctgatagttttagaggattagtgaatgcggttttgcgtagatttttacgtgagcaagatgaaattttggcaattatcgataaaaattggcaaacgtttcacccagaatggttcgtgaataaattaaaaaaagcctatccgaattggcgtgagatcattgaggcgaacaatcagaaaccaccaatgtggctacgtgtgaattcacaaaaaaacgccctcgaaacttaccgcactttacttgaggaacaaggtgtttcttcgaaaacaagccatcatcctaatgctctatgtttagatataccgattgctgtgcaaaaattaccgaactttgaagaaggggcggttacggtgcaagatttgagtgctcaatgggcggcaacgttgcttgagccaaaaaatgaggagtggatcctcgatgcttgcgcggcaccaggcggtaaaacgactcatattttagaactggcacctcaagctaatgtggttgcattagatgtagaatctcatcgcttaaaacgagtagaagaaaatcttgcacgtttaaatcagcaagcgatagtggtttgcggcgatgcgagtaaacctgacgaatggttagctaaaatcggtaaaagtgcggcgaaatttgaccgaattttacttgattccccttgttctgcaacgggagtgattcgccgccaccctgatataaaatggttacgcaaagaaaccgatatcgctcagcttgttgaattacagaagaaaattctgagtgcactttgggaaaaacttaagccaaacggtgttttgctttatgcgacttgttctgtattgccagaagaaaattgcgaacaaatccaagcatttttaaatgctcacgcggatgcggagttattgtcattaccttttggtgatgataaaagtgcggtgggttttcaattcattccgcaaccaaatagtggtgatgggttctattatgcgaaattgcttaaacgagcataa

SEQ ID NO: 1298 - protein, 450 aa, Haemophilus influenzae
MKKFSSKTIKVKNSVKMTALSTRAISANLILQVLDEGKSLSALIPEVQLSVKAQDLPLLQEICFGVCRVLPRLEQIIKRVVDKPLKGKTRIVHCLLLVGLYQLLYMRVPVHAAVDEVVNATKSLKSDSFRGLVNAVLRRFLREQDEILAIIDKNWQTFHPEWFVNKLKKAYPNWREIIEANNQKPPMWLRVNSQKNALETYRTLLEEQGVSSKTSHHPNALCLDIPIAVQKLPNFEEGAVTVQDLSAQWAATLLEPKNEEWILDACAAPGGKTTHILELAPQANVVALDVESHRLKRVEENLARLNQQAIVVCGDASKPDEWLAKIGKSAAKFDRILLDSPCSATGVIRRHPDIKWLRKETDIAQLVELQKKILSALWEKLKPNGVLLYATCSVLPEENCEQIQAFLNAHADAELLSLPFGDDKSAVGFQFIPQPNSGDGFYYAKLLKRA

SEQ ID NO: 1299 - DNA, 1377 bp, Haemophilus influenzae
atgaaaattatcattttgggtgcaggtcaggtaggaacgacgcttgcagaaaacttagtcagtgaagataacgatattaccttagtggataatgaatctcctcagttacaaacattgcaagaaaagcacgatttgcgtgtggtacaaggctctccatcatctccaaaagtgcttcgtgacgcaggcgcggcagatgccgatttaatggttgctgtgacagcctctgatgaaatcaatatggtcgcttgccaaatgggctatacattatttaatacgccaacgcgaattgcacgtatccgtaattcagaatatttacgtgaaaaagacaagttgttcaacaatgaaaatattcctattgatcatttaatttcgcctgaaaatcttgtaactgatgaaattacgcgtttaattgcttatccaggcgcattacaagttgcccattttgccaataatcgtattagtattgttgtagtgaaagcttattatgggggggctttggttggatatgcactttcagcatttcgcgaacatatgccacatattgattgtcgcattatgtctattttacgtaacggtaaaccgattcgtccacaaggctcaaccattgtagaagctggcgatgaaatcacgtttatttgtgctactgaacatattaaggcggtaatgggagagttacaacgtttggagaaaccttataagcgagtaatgattgttggtggaggaaatgttgcttctggcgtggcaaaacgtttggaaaattcttgtgttgtaaagcttattgaacgtgattcaaacagagcgcaagccttagcagaaaagttgccaaaaacgttagtatttaatggagatgcctcagaccaaaacttgctttttgaagaacatattgaaagtgtggatgtatttctttcattaagtagcgacgatgaagcgaatattatgtcagcgttgttagctaagcgtttaggcgcgaaaaaagcaatggtactgattcaacggattgcctatattaatcttattcagggaggcacgattgatattgcggtttctccacaacaagtaacgatttctgctttgttaggtcacgtgcgtaaaggcgatgtaaaaaatgtggcaacattacgacatggcattgccgaagccattgaaattgttgcgcacggcgatgcgaatacttcaaacatagtggggcgaaaaattggtgagttgcgtttgccgatgggaacaattattggggctttattgcgagagaatgatgtaattattgctcatcgtcaagtgattattgaagaaggcgatcatatagtgatttatttaagtgataagaaaaatgtgccagaaattgagaaattattccaaccaagtgcattctttatttag

SEQ ID NO: 1300 - protein, 458 aa, Haemophilus influenzae
MKIIILGAGQVGTTLAENLVSEDNDITLVDNESPQLQTLQEKHDLRVVQGSPSSPKVLRDAGAADADLMVAVTASDEINMVACQMGYTLFNTPTRIARIRNSEYLREKDKLFNNENIPIDHLISPENLVTDEITRLIAYPGALQVAHFANNRISIVVVKAYYGGALVGYALSAFREHMPHIDCRIMSILRNGKPIRPQGSTIVEAGDEITFICATEHIKAVMGELQRLEKPYKRVMIVGGGNVASGVAKRLENSCVVKLIERDSNRAQALAEKLPKTLVFNGDASDQNLLFEEHIESVDVFLSLSSDDEANIMSALLAKRLGAKKAMVLIQRIAYINLIQGGTIDIAVSPQQVTISALLGHVRKGDVKNVATLRHGIAEAIEIVAHGDANTSNIVGRKIGELRLPMGTIIGALLRENDVIIAHRQVIIEEGDHIVIYLSDKKNVPEIEKLFQPSAFFI

SEQ ID NO: 1301 - DNA, 387 bp, Haemophilus influenzae
atgaattttattaaagaatttcgcgaatttgcaatgcgtggtcatgttgtagatatggctgtcggtgtgattattggtagtgcatttggcaagactgtaagttcacttgttagtgatatttttatgcccgtgttagggattttaactggcagtattgatttcaaagatatgaaatttgtattagcacaagcacaaggcgatgttcctgcagttacgttaaattatggtttgtttattcaaaatgtgattgattttattattattgcttttgcaatttttatgatgatcaaagtaattaataaggtaagaaaaccagaggagaaaaaacctgtgccaaaggcagaaacattgcttactgaaattcgtgatttattaaagaataaataa

SEQ ID NO: 1302 - protein, 128 aa, Haemophilus influenzae
MNFIKEFREFAMRGHVVDMAVGVIIGSAFGKTVSSLVSDIFMPVLGILTGSIDFKDMKFVLAQAQGDVPAVTLNYGLFIQNVIDFIIIAFAIFMMIKVINKVRKPEEKKPVPKAETLLTEIRDLLKNK

SEQ ID NO: 1303 - DNA, 258 bp, Haemophilus influenzae
atggaaaaatataataaacttcgcattgaatgggattgtcgccgaggaatgttagagttggataaaatcattatgcctttttatttgaagcattttgatgaattaacagatgacaaaaaagatatatttattcgtttattagcaagtacagatctgcagctgttttcttggttttttaatcgtggtaaatcatcagattcagaaattcaatctatggtagaatatatccaaaatgtacaaaaaatcacaactaattaa

SEQ ID NO: 1304 - protein, 85 aa, Haemophilus influenzae
MEKYNKLRIEWDCRRGMLELDKIIMPFYLKHFDELTDDKKDIFIRLLASTDLQLFSWFFNRGKSSDSEIQSMVEYIQNVQKITTN

SEQ ID NO: 1305 - DNA, 570 bp, Haemophilus influenzae
atggctgaacagctaacagatcaggctttggtagaaagagtgcagcaaggggataagaaagccttcaatttgttggtttcgcgttatcagaataaagtggcggggcttttgactcgctatgtatcacgtaacgatattcctgatgtggtgcaagaatcctttataaaagcttatcgctcaattgaatcttttcgtggcgaaagtgctttctatacatggctttatcgaattgccgttaatacggcaaaaaattatttaacggctcaaggtcgccgtccaccaaatgaagatattttggcagaagatgctgaaaattatgatgtgggtacgcacttgcgggatgtggatacacccgaaaatgaaatgttgtctagtgagttagaaagaattgtttttgatactattcataacttaccagaagatttaaaaaccgcgattacgttacgagagctagaaggtttaagttacgaagagattgcagaaattatggattgtcctgttggtacggttcgttcccgaatcttccgagcaagggaaatgatcgaaaataaaattcaacctctaatgtag

SEQ ID NO: 1306 - protein, 189 aa, Haemophilus influenzae
MAEQLTDQALVERVQQGDKKAFNLLVSRYQNKVAGLLTRYVSRNDIPDVVQESFIKAYRSIESFRGESAFYTWLYRIAVNTAKNYLTAQGRRPPNEDILAEDAENYDVGTHLRDVDTPENEMLSSELERIVFDTIHNLPEDLKTAITLRELEGLSYEEIAEIMDCPVGTVRSRIFRAREMIENKIQPLM

SEQ ID NO: 1307 - DNA, 588 bp, Haemophilus influenzae
atgcaaaaagagcagctttcagcctatatggatggcgaacaagtcaaaactgacttgacagatgctttattaagagacgaagaattacaagcgtcttggcattcatttcataccgttcgttcagtaatgcgtaaagaaagtgcggtctttttagggggggattttaccgctaaaatggcagatttgattgagttagaagacgtgaagaaagtcgatgtcattgcggtgtctcaacctgaaccagaagatgcacataattctgcatttatgcaaaaattaaaggcattttttgcgccaatgacgcaagttgctgttgctgctggtgtatgtttagtggcagtacttggtgttcaatctttcaatagtaaaaacgaagcgtctaatttaccagaagcaccagtgttgcaaaccttgccatttaataatgcagttcaagaaattagctataatgcaccaagcaaagatacattgacttcagatcagcttgagaaaaaaagtcgtcgcattggcgcaatgttgcaaaactatgaattgcaacgtcgtatgcactctgatgctttaggtgtaagtagcagtcaagtaagataa

SEQ ID NO: 1308 - protein, 195 aa, Haemophilus influenzae
MQKEQLSAYMDGEQVKTDLTDALLRDEELQASWHSFHTVRSVMRKESAVFLGGDFTAKMADLIELEDVKKVDVIAVSQPEPEDAHNSAFMQKLKAFFAPMTQVAVAAGVCLVAVLGVQSFNSKNEASNLPEAPVLQTLPFNNAVQEISYNAPSKDTLTSDQLEKKSRRIGAMLQNYELQRRMHSDALGVSSSQVR

SEQ ID NO: 1309 - DNA, 948 bp, Haemophilus influenzae
atgaaaaaaatcgcattaaaatttaccgcactttctctttctttgctattaagtagcattgcttctgctgaagagctttctgcgaagcagtcgttagataaaatgacacaagcattggataatctcaattatgaaattgcctttgtgcaaactactccagcaaatatggattcatttcgttatcgacatatcaaacaagataacaaaacctacgcacaattagtcactttagatggtcgccagcaagaaattattcaacgtgataatttagtcagttattttcagccaaatgctcaagcatttacgcttaatagtggcaatatagttgatgcgatgcctgcggttgtgcgtgcaaattttgataagctttcttcttattatgatttcgtaaaattaggtaaagatcgtgttgctgggcgtttcgctgatacgattagaattgttcctaaagatgattttcggtatcaatatttggtgtttatcgatgaagaaaatggcttgttattacgcggtgatatgcttgatcgcgaaggcaaactacttgatcaatttagagttgtaacactttacatcgatgacagattgagaggattaacggattatattaacaaggtatcattgccccctttattgaaagaaagtaaaaatgaacaaagttcagatataacttggtctgcaggttggttgccacaaggtttttctttaattcgatatactcaagaaatattagaaaatgaaatcatagatagtgcattatatagtgatggcttatttacttttacgttgtttgtctctaatgtaggctctaatgacctaccagaaaatacttggaaacaaggggcttatacgatttatagcgaggtcatcggaggaaaagaaattacttttattgggcaattaccaatctcgacggcaaaacgcattgtacaagaagtcaaatttagataa

SEQ ID NO: 1310 - protein, 315 aa, Haemophilus influenzae
MKKIALKFTALSLSLLLSSIASAEELSAKQSLDKMTQALDNLNYEIAFVQTTPANMDSFRYRHIKQDNKTYAQLVTLDGRQQEIIQRDNLVSYFQPNAQAFTLNSGNIVDAMPAVVRANFDKLSSYYDFVKLGKDRVAGRFADTIRIVPKDDFRYQYLVFIDEENGLLLRGDMLDREGKLLDQFRVVTLYIDDRLRGLTDYINKVSLPPLLKESKNEQSSDITWSAGWLPQGFSLIRYTQEILENEIIDSALYSDGLFTFTLFVSNVGSNDLPENTWKQGAYTIYSEVIGGKEITFIGQLPISTAKRIVQEVKFR

SEQ ID NO: 1311 - DNA, 801 bp, Haemophilus influenzae
ttggatgaagtcagtatgatttatttaccattagctcgtttaattaattattacattgacgaaaaccttcgcagacaagctgttttacaccgttttttagggcgtaataaaacaaaagtaccttatatcattagcattgcaggtagcgtagcggtagggaaaagcacttcagcacgaatactccaatcacttctttcccattggccagcggagcgcaaagtagatcttataactactgatggttttttatatccattagaaaaactaaaaaaagatcatcttttacacaaaaaaggtttccctatttcttatgatacgcccaaacttattcattttttagctgatgtgaaatctggcaaaactgaggtggaagcaccaatctattcgcatttaacctatgatattattcctgataaatttaatgtgataaataaacctgacattcttattttagagggcttgaatgtacttcaaacgggtaataataaaaccaatcagacattcgtatcagattttgttgatttctctatttatgttgatgcagaagaaaaattattgaaagaatggtatatcaaacgatttctgaaattccgcgaaagtgcgttcaacgatcctaattcttactttaaacattatgccaatttatcgaaagaagaatccattaccaccgctagtaaaatttgggatgaaattaacgggttaaaccttaatcaaaatattcttccaactcgtgagcgagcaaatctaattctaaaaaaaggtcacaatcaccaagtagaattaataaaattaagaaaataa

SEQ ID NO: 1312 - protein, 266 aa, Haemophilus influenzae
MDEVSMIYLPLARLINYYIDENLRRQAVLHRFLGRNKTKVPYIISIAGSVAVGKSTSARILQSLLSHWPAERKVDLITTDGFLYPLEKLKKDHLLHKKGFPISYDTPKLIHFLADVKSGKTEVEAPIYSHLTYDIIPDKFNVINKPDILILEGLNVLQTGNNKTNQTFVSDFVDFSIYVDAEEKLLKEWYIKRFLKFRESAFNDPNSYFKHYANLSKEESITTASKIWDEINGLNLNQNILPTRERANLILKKGHNHQVELIKLRK

SEQ ID NO: 1313 - DNA, 576 bp, Haemophilus influenzae
atgtctaaagaaaaatttgaacgtacaaaaccgcacgtaaacgtgggtacaatcggccacgttgaccacggtaaaacaactttaacagcagcaatcacaaccgtattagcaaaacactacggtggtgcagcgcgtgcatttgaccaaattgataacgcgccagaagaaaaagcgcgtggtattaccatcaacacttcacacgttgaatacgatacaccgactcgccactacgcacacgtagactgtccgggacacgccgactatgttaaaaatatgattactggtgcggcacaaatggatggtgctattttagtcgtagcagcaacagatggtcctatgccacaaactcgtgagcacatcttattaggtcgccaagtaggtgttccatacatcatcgtattcttaaacaaatgcgacatggtagatgacgaagagttattagaattagtagaaatggaagttcgtgaacttctatctcaatatgacttcccaggtgacgatacaccaatcgtacgtggttcagcattacaagcgttaaacggcgtagcagaatgggaagaaaaatccttgagttag

SEQ ID NO: 1314 - protein, 191 aa, Haemophilus influenzae
MSKEKFERTKPHVNVGTIGHVDHGKTTLTAAITTVLAKHYGGAARAFDQIDNAPEEKARGITINTSHVEYDTPTRHYAHVDCPGHADYVKNMITGAAQMDGAILVVAATDGPMPQTREHILLGRQVGVPYIIVFLNKCDMVDDEELLELVEMEVRELLSQYDFPGDDTPIVRGSALQALNGVAEWEEKSLS

SEQ ID NO: 1315 - DNA, 102 bp, Haemophilus influenzae
  misc_feature 75, 76, 77, 78, 79: n is any nucleotide
atgggaagaaaaatccttgagttagcaaaccatttagatacttacatcccagaaccagaacgtgcgattgaccannnnncattccattcattaattaattaa

SEQ ID NO: 1316 - protein, 33 aa, Haemophilus influenzae
  VARIANT 25, 26, 27: Xaa is any amino acid
MGRKILELANHLDTYIPEPERAIDXXXFHSLIN

SEQ ID NO: 1317 - DNA, 588 bp, Haemophilus influenzae
  misc_feature 4, 5, 6, 7, 8: n is any nucleotide
atgnnnnnaccagaacgtgcgattgaccaaccgttccttcttccaatcgaagatgtattctcaatctcaggtcgtggtactgtagtaacaggtcgtgtagaacgtggtatcatccgtacaggtgatgaagtagaaatcgtcggtatcaaagatacagcgaaaactactgtaactggtgttgaaatgttccgtaaattacttgacgaaggtcgtgcaggtgaaaacatcggtgcattattacgtggaaccaaacgtgaagaaatcgaacgtggtcaagtattagcgaaaccaggttcaatcacaccacacactgacttcgaatcagaagtgtacgtattatcaaaagatgaaggtggtcgtcatactccattcttcaaaggttaccgtccacaattctatttccgtacaacagacgtaactggtactattgaattaccagaaggcgtggaaatggtaatgccaggggataacatcaagatgacagtaagcttaatccacccaattgcgatggatcaaggtttacgtttcgcaatccgtgaaggtggccgtacagtaggtgcaggcgttgttgcgaaaatcatcaaataa

SEQ ID NO: 1318 - protein, 195 aa, Haemophilus influenzae
  VARIANT 2, 3: Xaa is any amino acid
MXXPERAIDQPFLLPIEDVFSISGRGTVVTGRVERGIIRTGDEVEIVGIKDTAKTTVTGVEMFRKLLDEGRAGENIGALLRGTKREEIERGQVLAKPGSITPHTDFESEVYVLSKDEGGRHTPFFKGYRPQFYFRTTDVTGTIELPEGVEMVMPGDNIKMTVSLIHPIAMDQGLRFAIREGGRTVGAGVVAKIIK

SEQ ID NO: 1319 - DNA, 159 bp, Haemophilus influenzae
gtgggttgtggcattctaggtggcatatttggacgattattagcaaaaggtatcgcaggattatcacctgaaaaatggcgtggctgggttcgccaacatcctatttatattgttttattattgggtttagtgcttgccgcactgttggagtggaaatga

SEQ ID NO: 1320 - protein, 52 aa, Haemophilus influenzae
MGCGILGGIFGRLLAKGIAGLSPEKWRGWVRQHPIYIVLLLGLVLAALLEWK

SEQ ID NO: 1321 - DNA, 144 bp, Haemophilus influenzae
atgcgtgctttgaaaattggcgatgaaaataacgacaatagcgtgttgtccaatctaacattggcgcaacagaaaaacggccgcggtaaaagtgcggtagattttgaggcatttttatttctcttgttcggttttgctgcgtaa

SEQ ID NO: 1322 - protein, 47 aa, Haemophilus influenzae
MRALKIGDENNDNSVLSNLTLAQQKNGRGKSAVDFEAFLFLLFGFAA

SEQ ID NO: 1323 - DNA, 177 bp, Haemophilus influenzae
atgacaggcgcgcaactcgttctcatttggttcttgatttccagcattattgcatccataatctcgcgccaatttagtcctaaaccattttaccactttgctacaggccgttttcgccagcaaatgcaagctcgtcaagccgaagaattacgcagcaaaaccgaacaagagaaataa

SEQ ID NO: 1324 - protein, 58 aa, Haemophilus influenzae
MTGAQLVLIWFLISSIIASIISRQFSPKPFYHFATGRFRQQMQARQAEELRSKTEQEK

SEQ ID NO: 1325 - DNA, 858 bp, Haemophilus influenzae
atggtcactgcgcctgcgattatccatgccaaatacgatcacttggattttgatttacaagaaaatcccgttgcgttacagctgggaggaagtgatcctgaacaactcaaatattgtgcaaaacttgctgaggaacgaggttatcacgaaattaatcttaatgtaggatgcccttctgatcgcgtacaaaatggaatgtttggcgcttgcttaatggcgaaagcagatttggtggcagactgtgtagaacaaatgcaaagtgcggtcaaaattccagtcactgtgaaaacacgtattggtattgatgaattagacagctatgaatttttatgtgattttattgaaaaagttcaaggaaaaggttgccaagaatttattatccatgcacgaaaagcttggctttcagggttaagtcccaaagaaaatcgagaaattccgccattagattatgctcgtgtgtatcaactaaaacgtgattttccacatctaactatcgcaattaatggcggcataaaaaccattgaagaaatgaaacaacatttgcaatatgtggacggcgtgatggttgggcgagaggcctatcaaaatccaagtttacttgggcaaattgaccaagccttatttgatcctaacgcaccaattgttactgctcatgaagcggtacaatcaatgcttccttatattgaacaacaacttagccaaggagtacaccttaatcatatcgtccgccatatgttaggcgcattccaaaattgcaaaggtgctcgtcaatggcgacgttatttaagcgaaaatgcgtttaaacaaggtgcgggagttgaagtggttgaaaccgccttaagctttgtagaacactaa

SEQ ID NO: 1326 - protein, 285 aa, Haemophilus influenzae
MVTAPAIIHAKYDHLDFDLQENPVALQLGGSDPEQLKYCAKLAEERGYHEINLNVGCPSDRVQNGMFGACLMAKADLVADCVEQMQSAVKIPVTVKTRIGIDELDSYEFLCDFIEKVQGKGCQEFIIHARKAWLSGLSPKENREIPPLDYARVYQLKRDFPHLTIAINGGIKTIEEMKQHLQYVDGVMVGREAYQNPSLLGQIDQALFDPNAPIVTAHEAVQSMLPYIEQQLSQGVHLNHIVRHMLGAFQNCKGARQWRRYLSENAFKQGAGVEVVETALSFVEH

SEQ ID NO: 1327 - DNA, 291 bp, Haemophilus influenzae
atggcaattcaaactgaaaaaccgattgaatgtgtaggttgtaacacatttgatatgaaatcacttttcgataatcgtgattgtagtcaggttattgaatatatttatgacagtgaagaacaagctcaagaagcgctcgcattttttatccagaaagtgcgtgatgtagaaagtgaaccttgtgaaattcaatctgaaattacaaaactggatgatggctatttattaaaggcagatttcactttctgttgccaagctgaattggtgatttttcaaatgcgtattgcataa

SEQ ID NO: 1328 - protein, 96 aa, Haemophilus influenzae
MAIQTEKPIECVGCNTFDMKSLFDNRDCSQVIEYIYDSEEQAQEALAFFIQKVRDVESEPCEIQSEITKLDDGYLLKADFTFCCQAELVIFQMRIA

SEQ ID NO: 1329 - DNA, 1005 bp, Haemophilus influenzae
atggcaaaaccaattgtttttagtggcgtacagccttctggtgaattaactatcggaaattatttgggtgcgttgcgcaactgggtgaaaatgcaagaagattatgaatgtattttttgcgtagttgatttacatgcgatcactgttcgtcaagatcctgttgcccttcgcaaagcaacccttgatgtgcttgcactttatttagcgtgcggaattgatccaaataaaagtactatttttgttcaatctcacgttccagaacacacgcaattaagctgggtgttaaactgttacacctatttcggtgaaatgagccgaatgacgcaatttaaagataaatcagcgcgttatgcagaaaatattaacgtgggtttgtttgattatcctgtgttaatggcggcggatattttactttatcaagcaaaaagcgtgcctgttggcgatgaccaaaaacaacacttagaaattacgcgtgatattgcaaaccgctttaatgcgctttatggcaatattttcactattcctgaaattttcattggaaaagcaggcgcgcgtattatgtcattgcaagatcccgaaaagaaaatgtcaaaatcagatgataaccgcaacaacgtggtgacacttttagaagatccaaaatctgtggcgaagaaaattaaacgtgccgtaacagattcagatgagccgcctgttgttcgttatgatgtgcaaaataaagcgggggtatctaatcttttagatattctttctgcggttacggataagccaattgctgatcttgaaaaagaatttgaaggtaaaatgtacggacatttaaaaactgcagtagcggatgaagtctcaactttacttgctggtttacaagaacgtttccatcaatatcgtaatgatgaaactttattagataatatcttacgacaaggtgcggaaaaagctcgtgcaaaagcacaagaaaccttggcgaaagtgtatgaagctgtgggttttgtcgctgcaaaataa

SEQ ID NO: 1330 - protein, 334 aa, Haemophilus influenzae
MAKPIVFSGVQPSGELTIGNYLGALRNWVKMQEDYECIFCVVDLHAITVRQDPVALRKATLDVLALYLACGIDPNKSTIFVQSHVPEHTQLSWVLNCYTYFGEMSRMTQFKDKSARYAENINVGLFDYPVLMAADILLYQAKSVPVGDDQKQHLEITRDIANRFNALYGNIFTIPEIFIGKAGARIMSLQDPEKKMSKSDDNRNNVVTLLEDPKSVAKKIKRAVTDSDEPPVVRYDVQNKAGVSNLLDILSAVTDKPIADLEKEFEGKMYGHLKTAVADEVSTLLAGLQERFHQYRNDETLLDNILRQGAEKARAKAQETLAKVYEAVGFVAAK

SEQ ID NO: 1331 - DNA, 618 bp, Haemophilus influenzae
atgaaaaactaccacgatattgttcttgcccttgctggcgtgtgccaatcagcaaaattggttcatcaacttgcaacagaaagtcgagcagattcagagacatttttaaccgcacttaatagccttttcattacccagcctcaacgaattgaagatgtttttggtggcgaagttcgtcatttaaaattaggtctagaaaccttaattcatcagctcaacgcgcaaggcgatcaaaatttaactcgctattggctaagccttttagcattagaaggaaaattatcgaaaaatcccgatgccaaacaaacattaggcaatcgaatttctcgcctaaaagaacaagaaattcattacgctcgtgatagtgaaacaatgctatctattatggcaaatatttacagcgatattattagcccattgggcaaaaaaattcacatcctaggctcgcctgattatttgcgacaagaactcgtgcaaaataaaatccgtgcagttttacttgcaggcattcgctctgccgtgctgtggaaacaaatgggcggaacaaaatggcaaattttatttttccgcagaaaattacttgctaccgcaaaacagatttattcttctatttattaa

SEQ ID NO: 1332 - protein, 205 aa, Haemophilus influenzae
MKNYHDIVLALAGVCQSAKLVHQLATESRADSETFLTALNSLFITQPQRIEDVFGGEVRHLKLGLETLIHQLNAQGDQNLTRYWLSLLALEGKLSKNPDAKQTLGNRISRLKEQEIHYARDSETMLSIMANIYSDIISPLGKKIHILGSPDYLRQELVQNKIRAVLLAGIRSAVLWKQMGGTKWQILFFRRKLLATAKQIYSSIY

SEQ ID NO: 1333 - DNA, 1371 bp, Haemophilus influenzae
atgcaactctctacactgaccgcgctttcccctcttgatggtcgttatcaagataaagtaacgccattacgtgctatttttagcgaattcgggttaatgaaattccgtgtagctgtggaagttcgttggttacaaaaattagcttcaacggcagacattaccgaagtaccgccattttctacgcaagcaaatgcttttttagatggaattgtggctaattttaatgaggccgatgctgcgcgtattaaagaaattgaacgcacaaccaatcacgatgtaaaggccgttgaatattttctgaaagagaaaattcaaaatgaagtggaactagtgaaggtttccgaatttattcacttcgcttgcacctcagaagacattaacaatctctctcacgcattaatgttaagcaccgctcgtgacgaagtgattttacctgaatggcaaaaactgattgatgaaatcactcgtcttgcagaagaatataaaacgattccattactttctcgcacacatggccagccagcttcaccaagcaccgtgggcaaagaaatggcgaatgtcgtttatcgcctaaaacgtcaatttaaacaactccaaaacgcggaaatcttaggtaaaatcaatggtgcagtaggtaactacaatgcgcatttatcggcatatcctaatattgattggcataaattcagcgaagaatttgtcacttcattaggtattcaatggaatccttataccactcaaattgaaccgcacgattacatcgctgaattttttgatgctgtagttcgctttaataccattatcattgattttgatcgggatttatggggatacattgcattaaatcactttaaacaacgaacgattgcaggcgaaattggttcttcaaccatgccacataaagtcaatccaattgattttgaaaactcagagggcaatctaggattagccaatgcagtgatgacccatttaggtcaaaaattaccaatttctcgctggcagcgtgacttaacagattcaactgtattacgtaatttaggcgtaggattaggttattgtttgatcgcttatgcttcaacacgcaaaggcatcagtaaacttgaagtaaatcaaccgcacttattagaagaactcaatcaaaactgggaagttttggctgaacctattcaaaccgtaatgcgccgctatggaatagaaaaaccttacgaaaaattaaaagaattaacgcgaggtaaacgagtgacagaacaggctatgcgtgaatttattgataagttggatattccacaagaagaaaaattacgtttacaaaaattaacacctgctacttatattggggctgcagtggaattagtagaaaaactatcatag

SEQ ID NO: 1334 - protein, 456 aa, Haemophilus influenzae
MQLSTLTALSPLDGRYQDKVTPLRAIFSEFGLMKFRVAVEVRWLQKLASTADITEVPPFSTQANAFLDGIVANFNEADAARIKEIERTTNHDVKAVEYFLKEKIQNEVELVKVSEFIHFACTSEDINNLSHALMLSTARDEVILPEWQKLIDEITRLAEEYKTIPLLSRTHGQPASPSTVGKEMANVVYRLKRQFKQLQNAEILGKINGAVGNYNAHLSAYPNIDWHKFSEEFVTSLGIQWNPYTTQIEPHDYIAEFFDAVVRFNTIIIDFDRDLWGYIALNHFKQRTIAGEIGSSTMPHKVNPIDFENSEGNLGLANAVMTHLGQKLPISRWQRDLTDSTVLRNLGVGLGYCLIAYASTRKGISKLEVNQPHLLEELNQNWEVLAEPIQTVMRRYGIEKPYEKLKELTRGKRVTEQAMREFIDKLDIPQEEKLRLQKLTPATYIGAAVELVEKLS

SEQ ID NO: 1335 - DNA, 492 bp, Haemophilus influenzae
atggcattaaatcttcaagacaaacaagcaattgttgctgaagtaaatgaagcagccaaaggtgcactttcagcagtaattgcggattctcgcggtgtaactgttgagaaaatgactgaattacgtaaatcagcacgtgaagctggcgttacaatgcgtgtagttcgtaatactttattacgtcgcgcagttgaaggcacagattacgaatgcttaaaagatacgtttgtaggtccaacacttatcgcgttctctaacgaacacccgggcgcagctgctcgtttgttcaaagagtttgctaaagcaaacgataagtttgaaattaaaggtgcagcctttgaaggtaaaatccaagatgttgaattcttggcaacattaccaacttacgaagaagcgattgcacgtttaatgggcacaatgaaagaagctgcagcaggcaaacttgctcgcaccttcgcggcattacgcgacaaattacaagaagcagcttaa

SEQ ID NO: 1336 - protein, 163 aa, Haemophilus influenzae
MALNLQDKQAIVAEVNEAAKGALSAVIADSRGVTVEKMTELRKSAREAGVTMRVVRNTLLRRAVEGTDYECLKDTFVGPTLIAFSNEHPGAAARLFKEFAKANDKFEIKGAAFEGKIQDVEFLATLPTYEEAIARLMGTMKEAAAGKLARTFAALRDKLQEAA

SEQ ID NO: 1337 - DNA, 372 bp, Haemophilus influenzae
atgtcattaactaacgaacaaatcattgaagcgattgcttcaaaaactgtaactgaaatcgttgaattaatcgcagcgatggaagaaaaattcggtgtttcagcagcggcagcagtagcagcagctccagcagcaggcggcgcagcggcagcagaagaaaaaactgaattcgacgttgtacttaaatctgcaggtgcgaacaaagtagcagtaattaaagcagtacgtggtgcaactggtttaggcttaaaagaagctaaagatttagttgaatctgctccagctaacttaaaagaaggcgtttctaaagaagaagctgaagcacttaagaaagaattagaagaagcgggtgcagaagtagaagttaaataa

SEQ ID NO: 1338 - protein, 123 aa, Haemophilus influenzae
MSLTNEQIIEAIASKTVTEIVELIAAMEEKFGVSAAAAVAAAPAAGGAAAAEEKTEFDVVLKSAGANKVAVIKAVRGATGLGLKEAKDLVESAPANLKEGVSKEEAEALKKELEEAGAEVEVK

SEQ ID NO: 1339 - DNA, 1317 bp, Haemophilus influenzae
atgtattccgatttacctaaagttctacatacaattgcgggtaaaccaatggtaaaacatgtaattgatactgcccatcaattaggcgcagaaaatattcatttaatctatggtcacggtggggacttaatgcgtacccatcttgcgaatgaacaagtaaattgggtattacaaacagaacaacttggcacagcacatgcagttcaacaagcagctcctttttttaaggataacgaaaacattgttgtactttacggcgatgcaccattaataacgaaagaaacattagaaaaattaattgaagagaaaccagaaaatggcattgcattgcttaccgtaaatttagataacccaacaggctatggacgaattatccgtgaaaatgggaacgttgtagccattgtagaacaaaaagatgcaaatgcagatcaactaaatattaaagaagtaaatactggcgttatggtatctgatggtgcaagtttcaaaaaatggctcgctcgtgtaggcaataataatgctcaaggcgaatattacttaacggatcttattgctctcgcaaaccaagataattgccaagttgttgctgtacaagcaatagatgtcatggaagttgaaggcgcaaataatcgcttacaattagccgcacttgaacgttatttccaaaataaacaagcctccaaattattacttgaaggcgtaatgatctacgatcccgctcgttttgacctacgtggagcattagagcatggaaaagatgtggaaatcgatgttaatgttattatcgaaggtaatgttaaactcggtgatcgcgtaaaaattggcgcaggttgcgtattgaaaaatgttgttattggcaatgatgtagaactaaaaccctattcagtgctagaggattctatagtaggagaaaaagccgcaattggtccattttctcgtttacgcccaggtgcaaaacttgcagctgaaacgcatgtcggtaactttgtagaaattaaaaaatctaccgttggtaaaggttctaaagtaaatcatctaacttatgttggcgattcagaaattggctcaaattgtaatattggagcaggtgtcataacctgtaactacgatggcgcaaataaatttaaaacgatcatcggtaatgatgtatttgtgggatctgatacacaattagttgcgccagtgaaagtcgcaaatggtgcaactattggtgctgggactacaattacacgtgatgttggcgaaaatgaattagtgattacaagagttgctcaacgacatattcaaggttggcaacgaccaataaagaaaaaataa

SEQ ID NO: 1340 - protein, 438 aa, Haemophilus influenzae
MYSDLPKVLHTIAGKPMVKHVIDTAHQLGAENIHLIYGHGGDLMRTHLANEQVNWVLQTEQLGTAHAVQQAAPFFKDNENIVVLYGDAPLITKETLEKLIEEKPENGIALLTVNLDNPTGYGRIIRENGNVVAIVEQKDANADQLNIKEVNTGVMVSDGASFKKWLARVGNNNAQGEYYLTDLIALANQDNCQVVAVQAIDVMEVEGANNRLQLAALERYFQNKQASKLLLEGVMIYDPARFDLRGALEHGKDVEIDVNVIIEGNVKLGDRVKIGAGCVLKNVVIGNDVELKPYSVLEDSIVGEKAAIGPFSRLRPGAKLAAETHVGNFVEIKKSTVGKGSKVNHLTYVGDSEIGSNCNIGAGVITCNYDGANKFKTIIGNDVFVGSDTQLVAPVKVANGATIGAGTTITRDVGENELVITRVAQRHIQGWQRPIKKK

SEQ ID NO: 1341 - DNA, 312 bp, Haemophilus influenzae
atgaaaaaacaatctttaccaactaaatttagtccatttgcttggggtcttgctgccttttgttcgcctatattattgtgtccaatggcattattaatttctacagcatttagtaaaaatccctatctatcaagttggcaaatcaatttattttcaacgcttttttgggtttatccctttattctagctgttacagctagaatgctataccgtcttcatcaacataaacctaaactagcaaataaattattaacattaagtgcggtcattttttatgtgattttaattacgatttgtaaaattggtttataa

SEQ ID NO: 1342 - protein, 103 aa, Haemophilus influenzae
MKKQSLPTKFSPFAWGLAAFCSPILLCPMALLISTAFSKNPYLSSWQINLFSTLFWVYPFILAVTARMLYRLHQHKPKLANKLLTLSAVIFYVILITICKIGL

SEQ ID NO: 1343 - DNA, 756 bp, Haemophilus influenzae
atgctgaaatggtcagagctcgcttatgatttttatcatcaaggttacgatgtattgctatttgatcatcgcggtcaaggctattcacagcgtattattcctcaaaaagggcatttagatgaatttcgtttctatgtcgatgatatggcgaaaatcatcgaaaaagtaaccgcacttttcagctattcaacgcagcatttgcttgctcattcgatgggcgcattgattgcaacctattatttggcaaattatgatcatcacattaataaagcggtactttcttcgcctttttacggtattcttttaaaacatccaattagagatgaactgattattaccctaatgaatattttaggacaaggcgagcgttatgtttttggtaaagggccttatcaacaagcccacttggaatacaatgaattaactttctgtaaaaccagaatgaaatggatgaatcgtgtaaatcgtaaaaatccagcaattaatcttggcgggccaacattccgttgggtacatttatgtttgaacgcaattaaacgcttgccgaaagttattcctaagattgaaattccaatcctaattttacaagccgaaaaagaaaaaatagtagataacaacaatcttgaaaaattaaccgcactttttccgaatgctagatgtgaagttgtattcaatgctaaacacgaaattctatttgaacaggacaaattaagaaagaaaacaatctttaaaatgttagaatttttaaataattag

SEQ ID NO: 1344 - protein, 251 aa, Haemophilus influenzae
MLKWSELAYDFYHQGYDVLLFDHRGQGYSQRIIPQKGHLDEFRFYVDDMAKIIEKVTALFSYSTQHLLAHSMGALIATYYLANYDHHINKAVLSSPFYGILLKHPIRDELIITLMNILGQGERYVFGKGPYQQAHLEYNELTFCKTRMKWMNRVNRKNPAINLGGPTFRWVHLCLNAIKRLPKVIPKIEIPILILQAEKEKIVDNNNLEKLTALFPNARCEVVFNAKHEILFEQDKLRKKTIFKMLEFLNN

SEQ ID NO: 1345 - DNA, 1116 bp, Haemophilus influenzae
atgaaaaatgtaggctttatcggctggcgcggaatggtgggttccgtattaatggatcgtatgtcgcaggaaaatgattttgaaaatcttaatcccgtattttttacaacttcacaagcaggtcaaaaagcacctgtttttggtggcaaggatgcaggcgacctgaaaagtgcattcgatattgaagaacttaaaaaattagacattatcgtgacttgccaaggtggcgattacaccaatgaagtctatccaaaattaaaaacaacaggctgggatggttattgggttgatgccgcttctgcgttgcgtatgaaagatgatgcaattattgtgcttgatccagtaaaccaacacgtgatttctgaaggcttgaaaaaaggtattaaaactttcgtaggcggtaactgtaccgtgagcttaatgttaatggctatcggcggtctatttgaaaaagatttagtggaatggatttctgtggcaacttatcaagcggcttcaggtgctggcgcaaaaaatatgcgtgaattactttcacaaatgggtttattagaacaagcagtttcaagtgaattaaaagacccagcttcatctattttagatattgaacgtaaagtgactgcaaaaatgcgtgctgataacttcccaacagataactttggcgcggcattgggcggtagcttaatcccttggattgacaaacttcttcctgaaacagggcaaactaaagaagaatggaaaggttatgcagaaaccaacaaaattttaggtttaagcgacaatccaattcctgttgatggtttatgtgtgcgtatcggtgcattacgttgccacagccaagcgtttaccattaaattgaaaaaagacttaccattagaagaaatcgaacaaattattgcatcacataatgaatgggtaaaagtaattccaaatgacaaagaaaccacattacgtgaattaacgccagcgaaagtaacaggtacattaagcgtgccagtggggcgtttacgtaaattggctatggggcctgaatatttggcagcttttaccgtgggtgaccaattattatggggtgcggcagagccagttcgccgtatcttaaaacaattagtggcataa

SEQ ID NO: 1346 - protein, 371 aa, Haemophilus influenzae
MKNVGFIGWRGMVGSVLMDRMSQENDFENLNPVFFTTSQAGQKAPVFGGKDAGDLKSAFDIEELKKLDIIVTCQGGDYTNEVYPKLKTTGWDGYWVDAASALRMKDDAIIVLDPVNQHVISEGLKKGIKTFVGGNCTVSLMLMAIGGLFEKDLVEWISVATYQAASGAGAKNMRELLSQMGLLEQAVSSELKDPASSILDIERKVTAKMRADNFPTDNFGAALGGSLIPWIDKLLPETGQTKEEWKGYAETNKILGLSDNPIPVDGLCVRIGALRCHSQAFTIKLKKDLPLEEIEQIIASHNEWVKVIPNDKETTLRELTPAKVTGTLSVPVGRLRKLAMGPEYLAAFTVGDQLLWGAAEPVRRILKQLVA

SEQ ID NO: 1347 - DNA, 717 bp, Haemophilus influenzae
atggaaaattcatctttacttttaaccgcacttttcaatcctgatcacttaattatttttagcaaaatgctattagcgatggtgcttggcagtgttattggcttagaacgtgaacttaaacgtaagcctgtgggtgtaaaaacttgtgccattattgccgttaccacttgtgtgctaaccattgtttcaattcaagccgcagagcattatgcacaagtttcagaaaatattcgtacggatccgatgcgccttgcggctcaagtgattagtggcatcggttttttaggtgctggtgtgattttgcataagaaaaatgatgcgatttcaggtttaaccactgcggcgattatttgggcttctgcggggatcggtattgctgctggggcgggtttcgtgtttgatgcggtcatcgccactgtgatgattttggtgtctattcgattaagtccgttggttcaacgttgggttcatcgtaaatcacaacgtcgtcggacgaaattcaatattcttgtcaatgatgcggaaagcatagggaaagttacccaattgttagtaaataatcagtatcgtattgaacatatacaagtcaaagatcaaagtagtggagaagtgcggttacaaattcgttgcttttccattgattccacaatgttgaaagatgcgtatgctttacttaaagcagaagatggcgtaataagtgttgaagtagataactag

SEQ ID NO: 1348 - protein, 238 aa, Haemophilus influenzae
MENSSLLLTALFNPDHLIIFSKMLLAMVLGSVIGLERELKRKPVGVKTCAIIAVTTCVLTIVSIQAAEHYAQVSENIRTDPMRLAAQVISGIGFLGAGVILHKKNDAISGLTTAAIIWASAGIGIAAGAGFVFDAVIATVMILVSIRLSPLVQRWVHRKSQRRRTKFNILVNDAESIGKVTQLLVNNQYRIEHIQVKDQSSGEVRLQIRCFSIDSTMLKDAYALLKAEDGVISVEVDN

SEQ ID NO: 1349 - DNA, 738 bp, Haemophilus influenzae
ttgcgtttgaaattttatagagcgaaagaacggttattttatgcaaaattcaaccccaagcattggctttgtaagccttggctgcccaaaaaacttggcatttgggttcgcttacattatgtgtatccctatccccatgtggatgatttaattccattaatggcagacggcacgctcttgccgtatttagacattccattacaacacgccagccctaaaatcttaaaagcaatgaaaagaccaggcagtattgaccgcactttagaacgcattaaacaatggcgtgaaatttgcccagatttaacattgcgctccacctttattgttggtttccctggcgaaacggaagaagatttccaattattactcgatttcttaaaagaagcccaacttgatcgcgtaggctgtttcaaattcagtcctgttgaaggtgcacacgcaacagatatggctgaccaagtaccagaagatgtgaaagaagaacgtttccatcgcttcatgcaattacaacaagaaatttctgcaaaccgtttaaaacaaaaaattggtaaaacccttgatgtattagtggatgaaattgacgaagatggtattattggtcgctccaaagcagatgcccctgaagtagatgggttagtttacgtagataatttaagcggaatcaatgtcaaagtcggtgacgtgattaaagtaaccatcacaaattctgatgaatatgatttgtggggcagttgttaa

SEQ ID NO: 1350 - protein, 245 aa, Haemophilus influenzae
MRLKFYRAKERLFYAKFNPKHWLCKPWLPKKLGIWVRLHYVYPYPHVDDLIPLMADGTLLPYLDIPLQHASPKILKAMKRPGSIDRTLERIKQWREICPDLTLRSTFIVGFPGETEEDFQLLLDFLKEAQLDRVGCFKFSPVEGAHATDMADQVPEDVKEERFHRFMQLQQEISANRLKQKIGKTLDVLVDEIDEDGIIGRSKADAPEVDGLVYVDNLSGINVKVGDVIKVTITNSDEYDLWGSC

SEQ ID NO: 1351 - DNA, 579 bp, Haemophilus influenzae
atgaatattttattattagacggcggtaaggcgtttggtcattctcacggcgagttgaaccacacgcttcacaaaaaagcgaaagaagttttgaccgcacttggacacaatgtcaaagaaactgtaattgatgctggttatgacgttgaagctgaaatcgaaaaattcttgtggatggatgccgtgatttggcaaatgccgggctggtggatgcatgagccttggacagtgaaaaaatacatagacgaagtattaaccagtgggcacggcaagttatatcacagtgatggcagacacagcgttaatccaaccgagggctatggcacaggcggcttgttgcaaggcaaaaaacacatgctttcactgacttggaatgcaccgattgaaacctttactcgcgaaggcgatttctttgaaggcaaaggcgtggatgttttgtatatgcatttccacaaactcaacgagttcctcggtttgactcgcctgccgacattcttatgtaatgatgtggttaaaaatcctcaagtagaacaatacttagcagactaccaagcacatttggaaaaagtgttcggctaa

SEQ ID NO: 1352 - protein, 192 aa, Haemophilus influenzae
MNILLLDGGKAFGHSHGELNHTLHKKAKEVLTALGHNVKETVIDAGYDVEAEIEKFLWMDAVIWQMPGWWMHEPWTVKKYIDEVLTSGHGKLYHSDGRHSVNPTEGYGTGGLLQGKKHMLSLTWNAPIETFTREGDFFEGKGVDVLYMHFHKLNEFLGLTRLPTFLCNDVVKNPQVEQYLADYQAHLEKVFG

SEQ ID NO: 1353 - DNA, 2037 bp, Haemophilus influenzae
gtgggctcaataatttttatgaaactcaatcctcaacaacaacaagccgttgaatatgtaacaggcccttgtcttgtgcttgctggcgcaggctctggcaaaactcgcgtaatcattaataaaatagcccatttaattggaaagtgcggttattctccgaaacaaattgctgctgttactttcactaacaaagccgcacgtgagatgaaagagcgtgtggcacattccattggcaaagagcaatctaaaggcttgctcgtttccacttttcataccctcggttttgacattattaagcgtgaatataaagcgttgggctttaaatcaaatatgaccttgtttgatgaacaggatcaatttgcgttgttaaaagagctaaccgctgatgtgttaaaagaagataaggatttattgcgtgagttaatttcagtgatttctaactggaagaatgatttgatttcgccaaaacaggcgtttgcgttggcacgtgatgcaaaatatcaaacttttgcaaaatgttatgagcgttacgccacacaaattcgagcctacaacgcacttgattttgatgatttgattatgctgccgacgttgttgttcaagcgaaatgaagaagtgcggtcaaaatggcaggcaaaaattcgttatttgttggtggatgaatatcaagacactaacaccagccaatatgaactgattaaacttttagtgggggatcgtgcttgttttactgtggtgggcgatgatgaccaatctatttattcgtggcgtggcgcacgaccagaaaatatggtgcgtttacgcgatgatttccctcgtttgaacgtgattaagctagagcaaaattatcgttcaacccaacgcattctgcattgtgccaatattttgattgataacaatgaccacgtgtttgataagaaactcttttcaaccattggcgaaggggaaaaattgcttattatcgaagcaaaaaatgaagaacacgaagcagagcggattgtcgctgagttgatcgcccatcgttttagccgtaaaaccaaatataaagattatgcgattttgtatcgaggcaatcatcaatctcgattactcgaaaaagtactgatgcaaaaccgtattccttacaaaatttcgggtggtacttcttttttctcccgtgcagaaatcaaagatatgatggcgtacttgcgcttggtggtgaatcaagatgatgatgccgcattcctgcgtattgtgaatacaccgaaacgtgaaattggcaccgcgacgttacaaaaacttggagagttggctcaagaaaaacacatcagtttatttgaggctatttttgagtttgaacttatccaacgcatcacaccaaaagcctatgattcattgcaaaaatttggccgttggattgtagaacttaatgatgaaattcaacgttctgaaccagagcgagcggtacgttctatgttatccacgattcattatgaagaatatttgtacgaatacgcaacaagccctaaagcggcagaaatgcaaagtaagaatgtcgccacgttatttgactgggttgcggatatgttaaaaggcgatgaaaccaatgaaccaatgaaccttaatcaagtggtaacccgcctaacattacgagatatgttggagcgaggcgaaggcgaagacgatgacgacagcgatcaagttcaactgatgacattgcacgcatctaaaggattggaatttccttatgtttatttgatcggtatggaagagggcattttgccccaccaaactagcattgatgaagacaacgtggaagaagaacgccgcttggcttatgtgggtatcacaagagcacaaaaagaacttactttttccttgtgtcgagaacgccgtcaatatggcgaattagttcgcccagaaccaagccgatttttagctgaattacctaatgacgatgtgctatgggaacgcgataaaccaaaactaaccaccgagcaaaaacaagaaaaaacacaaaaccagcttgatagattgagggcgattttgaaaagttaa

SEQ ID NO: 1354 - protein, 678 aa, Haemophilus influenzae
MGSIIFMKLNPQQQQAVEYVTGPCLVLAGAGSGKTRVIINKIAHLIGKCGYSPKQIAAVTFTNKAAREMKERVAHSIGKEQSKGLLVSTFHTLGFDIIKREYKALGFKSNMTLFDEQDQFALLKELTADVLKEDKDLLRELISVISNWKNDLISPKQAFALARDAKYQTFAKCYERYATQIRAYNALDFDDLIMLPTLLFKRNEEVRSKWQAKIRYLLVDEYQDTNTSQYELIKLLVGDRACFTVVGDDDQSIYSWRGARPENMVRLRDDFPRLNVIKLEQNYRSTQRILHCANILIDNNDHVFDKKLFSTIGEGEKLLIIEAKNEEHEAERIVAELIAHRFSRKTKYKDYAILYRGNHQSRLLEKVLMQNRIPYKISGGTSFFSRAEIKDMMAYLRLVVNQDDDAAFLRIVNTPKREIGTATLQKLGELAQEKHISLFEAIFEFELIQRITPKAYDSLQKFGRWIVELNDEIQRSEPERAVRSMLSTIHYEEYLYEYATSPKAAEMQSKNVATLFDWVADMLKGDETNEPMNLNQVVTRLTLRDMLERGEGEDDDDSDQVQLMTLHASKGLEFPYVYLIGMEEGILPHQTSIDEDNVEEERRLAYVGITRAQKELTFSLCRERRQYGELVRPEPSRFLAELPNDDVLWERDKPKLTTEQKQEKTQNQLDRLRAILKS

SEQ ID NO: 1355 - DNA, 213 bp, Haemophilus influenzae
atgataaaaacctttatttttttaaccgcacttatcgttttgtctggttgtggttccgtggtcaaacttatcgatccaacagaaaaatataccgcctatgcaggggcggcttatgatcttgaaatggcccaacaatggggattcccaatcttagatttgcccctctcatttttattagacaccgtgttactgccctatgcgtgggctcaataa

SEQ ID NO: 1356 - protein, 70 aa, Haemophilus influenzae
MIKTFIFLTALIVLSGCGSVVKLIDPTEKYTAYAGAAYDLEMAQQWGFPILDLPLSFLLDTVLLPYAWAQ

SEQ ID NO: 1357 - DNA, 471 bp, Haemophilus influenzae
atgacgagcgtgatttatcctggcacttttgacccgattacaaacggtcatttagacattattgaaagaagtgcggtaatttttcctcgtgttttagtggcggtggcaaatagtccaagcaaaaaaacgctattttctttggaggaacgcgtggagcttgttcgtcaatctgttacgcatttatccaatgtggaggtgtttggcttttctgatttgttggcaaatgtgattaagcagcacaatatttctgccattattcgtggcgtacgcacgacaaccgattttgaatatgaacttcaattagctgcccttaatcgtttactcacaaaaggcgtagagagcttgtttttcccaccagcagaaaaatgggcgtttgtttcttccactattgtgcgtgaaatttatttgcatggcggagatgtcgctgagctagttcctgtgccagtattcaatgcgttaaaagcacgatga

SEQ ID NO: 1358 - protein, 156 aa, Haemophilus influenzae
MTSVIYPGTFDPITNGHLDIIERSAVIFPRVLVAVANSPSKKTLFSLEERVELVRQSVTHLSNVEVFGFSDLLANVIKQHNISAIIRGVRTTTDFEYELQLAALNRLLTKGVESLFFPPAEKWAFVSSTIVREIYLHGGDVAELVPVPVFNALKAR

SEQ ID NO: 1359 - DNA, 1233 bp, Haemophilus influenzae
ttgtgttttattggcttgctcagtgttaaatccccacgttatcgtcagcgtttggctgaacgttatggtttttatggcaatgcgtcttgcccaccactacaagggatctttatccacgcagcctccgtaggggaagtgattgctgcgacaccgctggttcgtcaattgcaacaagattatccacatttatccattacttttacgacttttacgccaacaggttcagagcgcgtcaaagccacttttggagacagtgtttttcattattatctcccctttgatttgcctttttcgatccatcgttttattaattttgtacaacctaaattatgtatcgtgatggaaacagaactttggcctaatcttattcatcaattatttttacgcaatatcccatttgtcatcgctaatgctcgtttatccgcacgttctgcacatcgttacggaaaaataaaagcgcgcttacaaacaatgtggtcgcaaattagcttgattgcagcacaagatcatattagcggaaaacgctatgccactttgggctatccaaaggaaaaattgaatatcacgggcaatattaaatatgatctctcgatcactgatgaattacgtgaaaagattgatgatttacgatctctttgggtaaaaaatcgtccgatttggattgcagcgagtacgcataacggagaagatgaaatcattttaaaatctcaccgcgctttgttagcaaaatacccaaatttattgttattgctcgttcctcgccatccagagcgttttaatatggtggctgatttactcaaaaaggaaaaattccaatttattcgccgttctacaaatgagttaccaaatgaaaatacccaagtaattttgggcgatagtatgggcgaacttatgttgatgtatggcgtttctgatattgcttttgtggggggaagccttgtgaaacacgggggacacaatccactggaacctcttgcgtttaaaatgccagtgattactggcaagcatacttttaatttccctgagatatttagaatgttggtggaagtgcaaggtgtgttggaagttaattcaaccgcagatgctttggaacgtgcggtagaagccttattaaattcaaaagaggctagcgaacgtttaggcaatgctggctatgaagtgctgatggaaaaccgtggtgcattacagcgtttgttagatttattaaaaccttatttggagcgtaatgtatga

SEQ ID NO: 1360 - protein, 410 aa, Haemophilus influenzae
MCFIGLLSVKSPRYRQRLAERYGFYGNASCPPLQGIFIHAASVGEVIAATPLVRQLQQDYPHLSITFTTFTPTGSERVKATFGDSVFHYYLPFDLPFSIHRFINFVQPKLCIVMETELWPNLIHQLFLRNIPFVIANARLSARSAHRYGKIKARLQTMWSQISLIAAQDHISGKRYATLGYPKEKLNITGNIKYDLSITDELREKIDDLRSLWVKNRPIWIAASTHNGEDEIILKSHRALLAKYPNLLLLLVPRHPERFNMVADLLKKEKFQFIRRSTNELPNENTQVILGDSMGELMLMYGVSDIAFVGGSLVKHGGHNPLEPLAFKMPVITGKHTFNFPEIFRMLVEVQGVLEVNSTADALERAVEALLNSKEASERLGNAGYEVLMENRGALQRLLDLLKPYLERNV

SEQ ID NO: 1361 - DNA, 765 bp, Haemophilus influenzae
atgcctacaattagcgttgcaatgattgtaaaaaatgaagcacaagacctcgccaattgcttagataccgtaaaagattgggtggatgagattatcattctagattctggtagcacagataacactaaagaaattgcgctcagttatggggcgaaattctatgaaaatagcgactggcaaggctttggtaaacaacgccaattagcccaacaatatgtaactagtgattatgtactctggttagatgctgacgaacgcgttacgcccaagttacaacaggctatcttaaatgcggttaaaaatgatcgagaaaataccgtttatgaaattccacgagtgagtgaagtatttgggcgtgaaattcgccattcaggctggtatcccgattatgtagttcgtctctatcgcacaaactatgcgcaatataatgattcacttgtacatgaaaaagtggaatttccagctggcacaaaagtagaaaaattgacaggggatttagagcatttcacttataaaagtatccatcattatctagtgaaatccgcaggttatgccaaagcctgggcagaccaacgccaagctaaaggaaaaaaagccacactttggcaaggaatttcgcacgcgcttggttgttttgtgaagatgtatttgttaaaagcgggttttttagatggcaaacaaggatttttattagcggtgttatcagcgcattcaacctttgtaaaatacgccgatttatgggagcgcgatcagcataaacactag

SEQ ID NO: 1362 - protein, 254 aa, Haemophilus influenzae
MPTISVAMIVKNEAQDLANCLDTVKDWVDEIIILDSGSTDNTKEIALSYGAKFYENSDWQGFGKQRQLAQQYVTSDYVLWLDADERVTPKLQQAILNAVKNDRENTVYEIPRVSEVFGREIRHSGWYPDYVVRLYRTNYAQYNDSLVHEKVEFPAGTKVEKLTGDLEHFTYKSIHHYLVKSAGYAKAWADQRQAKGKKATLWQGISHALGCFVKMYLLKAGFLDGKQGFLLAVLSAHSTFVKYADLWERDQHKH

SEQ ID NO: 1363 - DNA, 579 bp, Haemophilus influenzae
ttgtcaagttttaatatgcaacaaataaccagatgcccttgggttggcgaacaacctatttatattgattatcatgacaaggaatggggaaagcctgaattcgacagccaaaagctatttgaaaaaatttgtttggaagggcagcaagcggggctttcgtggattacggttttgaaaaaacgtgaatcttaccgtgaggcttttcatcaatttgatccgaaaaaaatcgcaaaaatgaccgcacttgatattgatgcttgcatgcaaaattcaggattaattcgccatcgagccaagttagaagccattgtcaaaaatgcgaaagcttatttggcgatggaaaagtgcggtgaaaatttcagtgattttatttggtcatttgtgaatcataaaccgattgtcaatgatgtgcctgatttgcgatctgtgccaactaaaacagaagtatcgaaagcactttctaaagccttaaaaaaacgtggtttcgtctttgttggcgaaaccacgtgctatgcgtttatgcaatctatggggctggtggacgatcatttaaatgattgtccttgcaaaactcgctag

SEQ ID NO: 1364 - protein, 192 aa, Haemophilus influenzae
MSSFNMQQITRCPWVGEQPIYIDYHDKEWGKPEFDSQKLFEKICLEGQQAGLSWITVLKKRESYREAFHQFDPKKIAKMTALDIDACMQNSGLIRHRAKLEAIVKNAKAYLAMEKCGENFSDFIWSFVNHKPIVNDVPDLRSVPTKTEVSKALSKALKKRGFVFVGETTCYAFMQSMGLVDDHLNDCPCKTR

SEQ ID NO: 1365 - DNA, 114 bp, Haemophilus influenzae
atggaaaataaatacagcgattttaatattttcacttctcgtgaacagcgtgaaggttttatggaacgtatttcatctatttccttagccctaaaaagcgaaaagcctcaatga

SEQ ID NO: 1366 - protein, 37 aa, Haemophilus influenzae
MENKYSDFNIFTSREQREGFMERISSISLALKSEKPQ

SEQ ID NO: 1367 - DNA, 807 bp, Haemophilus influenzae
atggatctttatgctgtatggggcaatccgattacgcaaagtaaatcgccattaattcaaaataagttagcaacgcaaacccatcaaaccatagaatacattgcaaaattaggtgatcttgatacttttgaacaccagcttttggcatttttcgatgagggcgcgaaaggttgcaatattacttcgccttttaaagaacgagcttatcagctggcagacgaatatagccaacgagcaaaattggcggaagcctgtaatacgctaaaaaaactcgatgatggaaaactttatgcggataacactgatgggattggtttagtgactgatttacaacgtttaaattggcttcacccaaatcagcgtgtattaatcttgggggcgggcggagcaacaaaaggcgtattattgccacttttacaagctcaacaaaatattgtgcttgctaaccgcactttttcgaaagccaaagaattagctgaaagatttcagccttacggcaatattcaagctgtctctatggattcgattccgctacaaacttatgatttggtgattaatgcaacttccgctggattaagtggtggaacggcttcagttgatgctgaaattttaaaattaggcgcagctttttacgatatgcaatatgcgaaaggcacagacacgccatttattgcattatgcaaaagtttgggtttaaccaacgttagcgatggctttggaatgttagtcgcgcaagcagcacattctttccatttatggcgaggcgtaatgccagattttgtctcggtttatgagcaattaaaataa

SEQ ID NO: 1368 - protein, 268 aa, Haemophilus influenzae
MDLYAVWGNPITQSKSPLIQNKLATQTHQTIEYIAKLGDLDTFEHQLLAFFDEGAKGCNITSPFKERAYQLADEYSQRAKLAEACNTLKKLDDGKLYADNTDGIGLVTDLQRLNWLHPNQRVLILGAGGATKGVLLPLLQAQQNIVLANRTFSKAKELAERFQPYGNIQAVSMDSIPLQTYDLVINATSAGLSGGTASVDAEILKLGAAFYDMQYAKGTDTPFIALCKSLGLTNVSDGFGMLVAQAAHSFHLWRGVMPDFVSVYEQLK

SEQ ID NO: 1369 - DNA, 483 bp, Haemophilus influenzae
  misc_feature 457, 458, 459, 460, 461: n is any nucleotide
atgaatagagaacaaatcgccgatgctcttcgacaaaatcaagtggttgcttatcccactgaagctgtgtttggtttaggctgtaatccgcaaagtgaaagtgcggtaaaaaaattacttgatttaaagcaacgtccagtggaaaaagggctgattttagtggcacctagcttggattttttccgtccttttgtcgattttgagcagattaacgatgaacagctttctcatctgcaaggtaaatatgaacgcccaacgacttggattgtgccagctaaatccaccaccccgcattttctcacaggcaaatttgatagcattgcaatacgtttgtgcgatcacccatctgtgaaagccttgtgtgaaatcacgggttttgcattaacttcaacgagtgcaaacctaacaggagagccaccttgccgtaccgccgatgaagtgcggttacaattcggtnnnnncattcattcattaattaattaa

SEQ ID NO: 1370 - protein, 160 aa, Haemophilus influenzae
  VARIANT 153, 154: Xaa is any amino acid
MNREQIADALRQNQVVAYPTEAVFGLGCNPQSESAVKKLLDLKQRPVEKGLILVAPSLDFFRPFVDFEQINDEQLSHLQGKYERPTTWIVPAKSTTPHFLTGKFDSIAIRLCDHPSVKALCEITGFALTSTSANLTGEPPCRTADEVRLQFGXXIHSLIN

SEQ ID NO: 1371 - DNA, 537 bp, Haemophilus influenzae
atgaatcaaagcctttttcatcatagcaaacaacaggaatattgccctcaatgtggtgcgcttttgcaaattaaacaaggcaaaaaagggctgtttttaggttgctctgcttatcctgaatgtgattatttgcgtcctttgcaacgatcggagcataaagtattaaaaacacttgatgaaatttgcccgaagtgcggtaatttattgcagttgaaacaaggcagttttgggatgtttattggttgtagccattatcctgaatgcgattttgtggtgcgggaagaatctgaatctgaggaaaaaattacttgtcctgaatgtaaaacggggcatttgatttctcgtcgaggtcgccaaggaaaaattttttacggctgtgataatttccctaaatgtaaattttctttgcctgccaagccttatgccgtgccttgcccaacctgccattttccactttctttgttaaaaagcgaagatggggaaaaacaaattttccagtgtgcaaataaaacttgccgtcatatttttgagcaataa

SEQ ID NO: 1372 - protein, 178 aa, Haemophilus influenzae
MNQSLFHHSKQQEYCPQCGALLQIKQGKKGLFLGCSAYPECDYLRPLQRSEHKVLKTLDEICPKCGNLLQLKQGSFGMFIGCSHYPECDFVVREESESEEKITCPECKTGHLISRRGRQGKIFYGCDNFPKCKFSLPAKPYAVPCPTCHFPLSLLKSEDGEKQIFQCANKTCRHIFEQ

SEQ ID NO: 1373 - DNA, 1917 bp, Haemophilus influenzae
atgattatatttagtaacttatctttaaaacgagggcaaacggaacttctcgaaaatgcgtctgctacgattaaccccaagcaaaaagtcggtttggtggggaagaatggttgtggaaaatcttcactttttgccttattaaaaaaagaattaatgccagagggcggtgaggtgaattatccagcaaattggcgggtatcttgggtgaatcaagaaacgcctgcattggatatttctgcgattgattatgtgattcaaggggatcgtgaatattgccgtttgcagcaagagcttgaacgtgcaaatgaacgcaatgacggtaacgctattgcgcgcattcatgagcaattagaaaccttggatgcgtggacaattcaatcgcgtgccgcttctttattgcatggtttaggatttagccaagaagaaacaatacagccagtgaaagccttttcgggcggttggcggatgcgtttgaatttggcacaggcattgctttgtccatcggatttattgttactggatgaaccgaccaaccatttggatttggatgcggttatttggttagaacgttggttagtgcaatatcaaggtactttggtattaatttctcacgaccgtgattttctcgatccaattgtgacaaaaatccttcatatcgaaaatcaaaagctcaacgaatacacgggcgattattcttcctttgaagtgcaacgagccactaaactggcacaacaaacagcgatgtatcgtcagcaacaacaaaagatttcccatttacaaaaatatattgatcgctttaaagccaaagcgaccaaagccaaacaggcacaaagccgtatgaaagcactagaaagaatggagctgattgcgcctgcttatgtggataatccttttacttttgaatttcgtccaccgcaatccttgccgaatcccttagtgatgattgagcaagcgagtgcaggttatggtagcggagaaagtgcggtagaaattttaagtaaaattaaactgaatttagtgccaggttcgcgcattggtttactcgggaaaaatggtgcgggaaaatcaaccttaattaaacttttagcgggagaactgaccgcactttcaggcacagtgcagttggcaaaaggtgttcaacttggctattttgctcagcatcaattagatactttacgcgcagacgaatctgctctgtggcatatgcaaaaactcgcgcctgagcaaacggagcaacaagttcgggattatttaggcagttttgcgttccacggcgataaagtaaatcaagcagtgcaatctttttctggaggagaaaaagctcgtttggtgttggctttgattgtttggcaacgcccgaatttattactacttgatgaaccgactaaccatttggatttggatatgcgtcaagcattaacggaagcgttggtggattacgaaggttctttggtggtggtgtcgcacgatcgtcatttattacgcaataccgtggaagaattttatttagttcacgataaaaaagtggaagaatttaaaggcgatttagaagactatcaaaaatggctgagtgagcaaaatagcacgcctgaaaataaagtttcagaaaaagtgggcgataatgaaaattcggttcaaaatcgtaaggaacaaaaacgccgtgaagcagagttacgccaacaaactgcaccattacgtaaaaaaatcacgcaattagaagaaaaaatgaataaattttcttctgagcttgcgaacatagaaaatcaactggctgatgctgaattatataatgcggaaaataaagaaaaattgaccgcacttttggctcaacaagtggatgtgaagaaagcattagatgatgtagaaacggaatggatgaccgcacaggaagaattggaagaaatgcttcaagcataa

SEQ ID NO: 1374 - protein, 638 aa, Haemophilus influenzae
MIIFSNLSLKRGQTELLENASATINPKQKVGLVGKNGCGKSSLFALLKKELMPEGGEVNYPANWRVSWVNQETPALDISAIDYVIQGDREYCRLQQELERANERNDGNAIARIHEQLETLDAWTIQSRAASLLHGLGFSQEETIQPVKAFSGGWRMRLNLAQALLCPSDLLLLDEPTNHLDLDAVIWLERWLVQYQGTLVLISHDRDFLDPIVTKILHIENQKLNEYTGDYSSFEVQRATKLAQQTAMYRQQQQKISHLQKYIDRFKAKATKAKQAQSRMKALERMELIAPAYVDNPFTFEFRPPQSLPNPLVMIEQASAGYGSGESAVEILSKIKLNLVPGSRIGLLGKNGAGKSTLIKLLAGELTALSGTVQLAKGVQLGYFAQHQLDTLRADESALWHMQKLAPEQTEQQVRDYLGSFAFHGDKVNQAVQSFSGGEKARLVLALIVWQRPNLLLLDEPTNHLDLDMRQALTEALVDYEGSLVVVSHDRHLLRNTVEEFYLVHDKKVEEFKGDLEDYQKWLSEQNSTPENKVSEKVGDNENSVQNRKEQKRREAELRQQTAPLRKKITQLEEKMNKFSSELANIENQLADAELYNAENKEKLTALLAQQVDVKKALDDVETEWMTAQEELEEMLQA

SEQ ID NO: 1375 - DNA, 297 bp, Haemophilus influenzae
atgaataaaatcagcccattaggttcaaattggaatgagtttgaacagcaaattttcaatgaagaagaaatccgagaaagtaatttgcgtgtagccttaattaaagaattgattacttctcgccagcaacttgggatttcccaaaaacaacttgaaaccttaagcggtgtgaagcaacctatgattgcacgcattgaaaaaggacaaacgaatcctcagcttgaaacgttgttaaaattgctcgctcctttagggaaaaccctgtcgattgttcctctaagggtaaaaaatgcctaa

SEQ ID NO: 1376 - protein, 98 aa, Haemophilus influenzae
MNKISPLGSNWNEFEQQIFNEEEIRESNLRVALIKELITSRQQLGISQKQLETLSGVKQPMIARIEKGQTNPQLETLLKLLAPLGKTLSIVPLRVKNA

SEQ ID NO: 1377 - DNA, 360 bp, Haemophilus influenzae
atgtacgagattctcctttacagagaccaaaatgacattgagccagtgaaagagtatctgctatctctggctcaaaatgaaagcaaagatagtcgaattaaactgaataaaattcgagattatgtaaagttattaagcgaactcgggacgtctgttggcaaaccctatgtgaaacatttagacggtgaaatttgggaacttcgtccaattagggatcgcatcttgtttgcaagattaatggatggtcgctttgtcttactacatcaatttatgaagaaaacacaaaaaacgccaaaacgagaaatccaaacagcccaacaacgcttaagtgaattaaaagagagattgaaaaatgaataa

SEQ ID NO: 1378 - protein, 119 aa, Haemophilus influenzae
MYEILLYRDQNDIEPVKEYLLSLAQNESKDSRIKLNKIRDYVKLLSELGTSVGKPYVKHLDGEIWELRPIRDRILFARLMDGRFVLLHQFMKKTQKTPKREIQTAQQRLSELKERLKNE

SEQ ID NO: 1379 - DNA, 2988 bp, Haemophilus influenzae
atgaccaattttagattaaacgtgcttgcctattccgttatgcttgggctaacggcaagtgttgcttatgcagaaccaaccaaccaaccaaccaaccaaccaaccaaccaaccaaccaaccaaccaaccaaccaaccaaccaaccaaccaaccaaccaaaatagtaatgcttctgaacaactagaacaaataaatgtttctggctctaccgaaaatactgatacgaaagctccgcctaaaattgccgaaactgtaaaaacggctaaaacgctagaaagagaacaagcaaacaacattaaagacatcgttaaatacgagactggcgttactgttgttgaagctgggcgttttggtcaaagcggttttgcgattagaggggttgatgaaaatcgagtagcgattaatattgatggattacgtcaagctgaaaccttatcttctcaaggctttaaagagctttttgaaggttatggtaacttcaataacacgcgtaatggtgcagaaattgaaaccttaaaagaagtaaatatcacaaaaggtgctgattctattaagaatggtagtggttccttaggtggttctgtaatttataaaacaaaagatgcgagggattatctcataaacaaggattactatgtaagttacaaaaagggatacgctacagaaaataatcaatcattcaatactcttactcttgcaggacgttataaaaagttcgatgtgctagtggttacaacaagcagaaatgggcatgaacttgagaactatggttataaaaattataacgataaaattcaaggtaaaaaaagagaaaaagcagatccatataaaattgaacaagatagtacattattaaaattatctttcaatcctacagaaaatcatcgttttacctttgccgctgatttatatgaacatcgttctcgtgggcaagatttatcctatacattaaaatatcaaaaaacagatcctaatttagccgaagttgattctagacacaccaatgataaaacaaagagacgtaatatttcatttagttatgaaaatttctcccaaactccattttgggatacattaaaaatcacttattctgatcaacgtattaaaactcgtgcacgcacagatgagtattgtgatgctggagtaagacattgtgaaggcacagacaatcctacgggactaaaagtaacagatgggaaaataacacgtcgagatggatcagaacttcaatttgagaaaaaaaacaatacagctcatagtaatggtgaaacctatgacttcaagaaatttattgatactgataagaaagtaatagaagataaactaaccctaaagaaccccaatgacacttggtatgattgttcaatatttaattgtgaaaataacgcaaaaatcaaagtttttgaaggtaactattcttatggctatgatggaaaatggaaagaagttgaccttgaaataaaaacattaaatggcaaaaaattcgctaaaataaaggatccgactaataaaataaaatctattcttccttcttcacctggttatttagaacgcctctggcaagagagagatttagacaccaatacccaacaattaaatttagatttaaccaaagacttcaaaacttggcatattgaacataatctacaatatggcggatcatataataccgcgatgaagcgaatggttaatcgtgctggcaacgatgcttctgatgtgcaatggtgggcaacacctacgcttggttacaatttttatgatcaaccttacacttgtgcaacggcttatagctggaatgctaacctttgccctcgagttgatcctgaattttcttacttattacccattaaaacaacaggaaaatcagtctatctctttgataattttgttataactgattatttatcttttgatttgggttatcgttatgacaatatccattatcaaccaaaatataaacacggtatcacacccaaattacccgatgatattgtgaaaggattatttattccattaccaaaaaattcaaattcaaaacctgatgaagttaagaaaaatgtacaacaaaatattgactatatcgccaaacagaacaaaaaatataaagcacattcttatagttttgtttcaacgattgatccaacgagttttcttcgtttacaactaaaatattctaaaggttttagaacaccaacttcagatgaaatgtatttcacctttaaacaccctgatttcactattttgccaaatactgatttaaaaccagaaatagcaaaaaccaaagaaattgctttcacattacataatgatgattggggatttatctcgacaagtctgtttaaaactaactataaaaactttattgacctaatatttaaaggggaaaaagatttccctttagttagcggaggtagctcattaccattttctctttatcaaaatataaatagagataatgcgtctttaaaaggtattgaaattaattcaaaagtattccttggtaaaatggcaaaatttatggatggatttaacctaagctataaatatacctatcaaaaaggcagaatgaatggcaatattcctatgaatgcgattcagcctagaactatggtatatggtttaggatatgatcatccaaatcataaatttggtttcgatttctatacgacacatgtagcaagtaaaaatccagaagatacctatgatatttatgcgaaagataaaaaacaaaccgacactagcataaaatggagaagcaaatcttatactattctagatttaattggatatgtgcaaccaattaaaaatttaaccataagagctggtgtatataatcttacaaaccgtaaatacattacttgggattctgcgcgttcaattcgttcatttggtacaagtaatgttatagaacaatcaacaggattaggcattaaccgtttctacgcaccaggtagaaattataaaatgtcagttcagtttgaattttaa

SEQ ID NO: 1380 - protein, 995 aa, Haemophilus influenzae
MTNFRLNVLAYSVMLGLTASVAYAEPTNQPTNQPTNQPTNQPTNQPTNQPTNQNSNASEQLEQINVSGSTENTDTKAPPKIAETVKTAKTLEREQANNIKDIVKYETGVTVVEAGRFGQSGFAIRGVDENRVAINIDGLRQAETLSSQGFKELFEGYGNFNNTRNGAEIETLKEVNITKGADSIKNGSGSLGGSVIYKTKDARDYLINKDYYVSYKKGYATENNQSFNTLTLAGRYKKFDVLVVTTSRNGHELENYGYKNYNDKIQGKKREKADPYKIEQDSTLLKLSFNPTENHRFTFAADLYEHRSRGQDLSYTLKYQKTDPNLAEVDSRHTNDKTKRRNISFSYENFSQTPFWDTLKITYSDQRIKTRARTDEYCDAGVRHCEGTDNPTGLKVTDGKITRRDGSELQFEKKNNTAHSNGETYDFKKFIDTDKKVIEDKLTLKNPNDTWYDCSIFNCENNAKIKVFEGNYSYGYDGKWKEVDLEIKTLNGKKFAKIKDPTNKIKSILPSSPGYLERLWQERDLDTNTQQLNLDLTKDFKTWHIEHNLQYGGSYNTAMKRMVNRAGNDASDVQWWATPTLGYNFYDQPYTCATAYSWNANLCPRVDPEFSYLLPIKTTGKSVYLFDNFVITDYLSFDLGYRYDNIHYQPKYKHGITPKLPDDIVKGLFIPLPKNSNSKPDEVKKNVQQNIDYIAKQNKKYKAHSYSFVSTIDPTSFLRLQLKYSKGFRTPTSDEMYFTFKHPDFTILPNTDLKPEIAKTKEIAFTLHNDDWGFISTSLFKTNYKNFIDLIFKGEKDFPLVSGGSSLPFSLYQNINRDNASLKGIEINSKVFLGKMAKFMDGFNLSYKYTYQKGRMNGNIPMNAIQPRTMVYGLGYDHPNHKFGFDFYTTHVASKNPEDTYDIYAKDKKQTDTSIKWRSKSYTILDLIGYVQPIKNLTIRAGVYNLTNRKYITWDSARSIRSFGTSNVIEQSTGLGINRFYAPGRNYKMSVQFEF

SEQ ID NO: 1381 - DNA, 1626 bp, Haemophilus influenzae
  misc_feature 4, 5, 6, 7, 8: n is any nucleotide
atgnnnnnacaggcggcttattttcacgaattaagcctgttaagtgcggtcattttgggcatccttttgattgcagcattggcattacgtgcttttgcaggtaaaaaatcggtgcaggcgtcttattttgccagtaccaaagtgaagcatgaattgcgtagccttatttatcgtaaattggcttctatgccgcttaatcaagtgaatcagcaatccacttcaagcattatccaagtggcatcagaaggtgtagaacagcttgaaatctactttgggcgttatttgccgcagcttttttatagcttgcttgcaccgcttacactctttgctttcttgatttttttcagttttaaaactgccgtgattttgttgatttgtgtgccgcttatccctatgtcgattattgcggtgaataaaattgcgaaaaaacttttggcaaaatattggtccatttatgtgggattaggcagtagctttttagataacttacagggtttaattacgctaaaaatctatcaagatgatgcttataaagcgaaagagatggataaagaggctgagcatttccgcaaaatcaccatgaaagtgcttactatgcagcttaattcagtatcgctaatggatttactcgcttatggcggcgcagcaatcgggattttaaccgcactattgcaattccaagatgcacaactcagcgtgttaggcgtgattttatttattctactttcttctgagttctttattccacttcgtttgcttggttcattcttccatgtggcgatgaatggcaaagcggcttcagataagatcttcacattgcttgatacgccagtggaaacccaacaaagtgcggtaaattttgaagcaaaaaataaccttcaagtggaaattaaagatctgcatttttcttatagtgaagaaaaaccagcgattacaggtttagatttgagtatcttaccaaaccaactttctgtatttgtgggtaaaagtggttgcggtaaatcaaccttagtttcgttattgatgggctttaataaagcgcaacaaggtgagattttatttaatggacaaaacgccctcaatattgaccgcacttctttctatcaaaaagtatcattggtaagccatagcagttatgtgtttaaaggctcactgcgtgaaaatatgacgatggcgaaaattgatgctacagatgaacaaatttatgcgtgtttagaacaagtcaatcttgcccaattcgttcgtgataatggcggattagatatgcaattattaagccgtggcgcaaatttatcgggcggtcagattcaacgtttagccttagcacgtgctttattacacawtgccgagctttatatttttgatgaagcgaccagtaacattgatgtagaaagcgaagaaatwattttgcagtttattcaacaatttaaacaacaaaaaactattgtgatgatttctcaccgcttggcgaatgcggtaaatgcggactgtattaacgtacttgaccaaggcaaattgattgagcaaggcacacataaagagctaatggaaaaacaaggtgcgtatgctgaaatgttccaacaacaaaaagatttagaacaaattagagaggtggcaaatgcgtaa

SEQ ID NO: 1382 - protein, 541 aa, Haemophilus influenzae
  VARIANT 2, 3, 448: Xaa is any amino acid
MXXQAAYFHELSLLSAVILGILLIAALALRAFAGKKSVQASYFASTKVKHELRSLIYRKLASMPLNQVNQQSTSSIIQVASEGVEQLEIYFGRYLPQLFYSLLAPLTLFAFLIFFSFKTAVILLICVPLIPMSIIAVNKIAKKLLAKYWSIYVGLGSSFLDNLQGLITLKIYQDDAYKAKEMDKEAEHFRKITMKVLTMQLNSVSLMDLLAYGGAAIGILTALLQFQDAQLSVLGVILFILLSSEFFIPLRLLGSFFHVAMNGKAASDKIFTLLDTPVETQQSAVNFEAKNNLQVEIKDLHFSYSEEKPAITGLDLSILPNQLSVFVGKSGCGKSTLVSLLMGFNKAQQGEILFNGQNALNIDRTSFYQKVSLVSHSSYVFKGSLRENMTMAKIDATDEQIYACLEQVNLAQFVRDNGGLDMQLLSRGANLSGGQIQRLALARALLHXAELYIFDEATSNIDVESEEIILQFIQQFKQQKTIVMISHRLANAVNADCINVLDQGKLIEQGTHKELMEKQGAYAEMFQQQKDLEQIREVANA

SEQ ID NO: 1383 - DNA, 1659 bp, Haemophilus influenzae
atgcgtaaaaatggttttgttgtaatggggcatttgttgaaattagtgactccacttgcgcacattatggcgtttaccattactatgggtacgctcggtttccttgctgccatctttattatggtgctgggtgcgacggggttagtgaatcttcttaactttgacacccwtttaagtttctctggaattttgaccgcacttatcgtattggcggtggctcgtggtgcattgcgttatttagagcaaatgtcagggcattatatcgcctttaaattactggcattattgcgtgacaaagtgttttcttccttacgtcgtttggcttttgtgaagttgcaagataaacaagcagggcaattagtgtctttagtgactaatgatatcgaattactcgaagtgttctatgcgcataccatcgcaccaattatgatcgcattctttacctctgcgattttattgttggtctttgcccagctttcaagctggtttgtacttgtggcattggctgcttatttaacagttggcgtgattttaccgattatcaccaccaaattggcacgtgaagatggcagacgttatcgtgaattagtgggggaaatgaatgacttcttcctcgatagcgtgcgtggtatgaaagaaattcagcttttcggttatgcaaaacaacgtttagatgaaattcaacaacgcagccaaaaaatcgatacggcgtttgagcgtatcaaaaaccaagaagcgaaagttcgtgtttatactgaagtggcagtatctgttttcaacattattatgctgtttactggcttaattttatttagcttagataaaattgatttcgctgcctttttaatcggcgtgattttattgatgtcgagctacgggccagttatcgccttaagtaacctctcaagcaacttgttacaaaccttggcttcaggtgagcgagtattaagtttattagcggaagaaccagagttaaaagatgtagaaagtgcggtagatttaaaagatgtttctcgcattgatgtggagaatgtaaacttcgcttacggcgaagaacaaattttatcggatgtcagcttatctgtgaaaaaaggcgaaatcttaggtattcacggcagaagcggaagcggtaaaagtaccttgttaaaactgctgatgcgtttttatgatccaaaatcaggtagcattaaaattaacggcgaaaccttaccgaatatcaacacccgtagtttgcgtgacaatatggcgtacattactcagcaaacctatattttcaacgaaaccattgaagaaaatattcgcctcgcgcgccgtgatgcaaccttagaagaaattatggaagcggcgaagaaagcctcaattcacgattttattttaagtttgccacaaggctatcaaacaaaaatgacagaattgggcggcaatctttctgacggagaaaaacaacgtatcggtattgcccgagcattcttgcataatgcaccgattatcttgcttgatgagccaaccagtaatttggatagcttaaacgaagcaatgattttgaaatcattactcaatgtgaaagctgaaaaattgattattctcgtcagccaccgccaatctaccatggcaatttgcgatcaggtaattggcatagaaaacggcagaatgtcctaa

SEQ ID NO: 1384 - protein, 552 aa, Haemophilus influenzae
  VARIANT 57: Xaa is any amino acid
MRKNGFVVMGHLLKLVTPLAHIMAFTITMGTLGFLAAIFIMVLGATGLVNLLNFDTXLSFSGILTALIVLAVARGALRYLEQMSGHYIAFKLLALLRDKVFSSLRRLAFVKLQDKQAGQLVSLVTNDIELLEVFYAHTIAPIMIAFFTSAILLLVFAQLSSWFVLVALAAYLTVGVILPIITTKLAREDGRRYRELVGEMNDFFLDSVRGMKEIQLFGYAKQRLDEIQQRSQKIDTAFERIKNQEAKVRVYTEVAVSVFNIIMLFTGLILFSLDKIDFAAFLIGVILLMSSYGPVIALSNLSSNLLQTLASGERVLSLLAEEPELKDVESAVDLKDVSRIDVENVNFAYGEEQILSDVSLSVKKGEILGIHGRSGSGKSTLLKLLMRFYDPKSGSIKINGETLPNINTRSLRDNMAYITQQTYIFNETIEENIRLARRDATLEEIMEAAKKASIHDFILSLPQGYQTKMTELGGNLSDGEKQRIGIARAFLHNAPIILLDEPTSNLDSLNEAMILKSLLNVKAEKLIILVSHRQSTMAICDQVIGIENGRMS

SEQ ID NO: 1385 - DNA, 489 bp, Haemophilus influenzae
ttgcagcacacagaaaatcatttagctcagcaacgagaaatttttcgtcgaattatttacgcttatttattaggaaataatgatcttcacttacgcaatttttcatttatttatcccaaaaacagtcatccaaaacttgctccaatttatgattttgtgtcagtgtcgccctatcctgaaatatttaattcaacactacttgccttgccattgttagtgcgagaagagggtaatgccacactagccaaaggatttaatactcaatacggtgaatatatcggcgatgattttgtcgagtttggggaaaatattggattaaataaaaatgtgattattcaaaaattaattcctgaaattacacaagaaaaggaaaaagtagagcagatttattcacaatcctttatgccgcagccacatattgattgcgtgctgaaaacttatcgcaagcgtttagcttttcttaacctattaaatgaacctgaactataa

SEQ ID NO: 1386 - protein, 162 aa, Haemophilus influenzae
MQHTENHLAQQREIFRRIIYAYLLGNNDLHLRNFSFIYPKNSHPKLAPIYDFVSVSPYPEIFNSTLLALPLLVREEGNATLAKGFNTQYGEYIGDDFVEFGENIGLNKNVIIQKLIPEITQEKEKVEQIYSQSFMPQPHIDCVLKTYRKRLAFLNLLNEPEL

SEQ ID NO: 1387 - DNA, 570 bp, Haemophilus influenzae
atgaatttttgtcgtattttattaaagccattaaagaaaaatgaagcactttcaggttacagtgctgaaggtttgcattaccttacaggcaataaacattttaatcctgaattacctttttctcgccaagaatttattacagtgaaaccccaaaaacagcaaggaatgagcatttcaggttttcaaccaaaattacagcttattatcgaagatgatcactttaacagcataaatcaacagggaaactatattttaaagccctctccagaagagtatccttttttagctgaaaatgaacacgccaccatgcgcattatgaaagaattagggtttgatgtgccagaaaatggtttagtttcttttgctggcgaacaaaatcataaagaatttgcttttgttataaagcgttttgatcgtgataaacagcaaaaaacaatgcaccaagaacaacttgatggtgcaatgaatattcgagacaagtatggaaaaataggtgcagataatgagcaatatgtaagttatgaacaaattgctaaaagtttattttgcagcacacagaaaatcatttag

SEQ ID NO: 1388 - protein, 189 aa, Haemophilus influenzae
MNFCRILLKPLKKNEALSGYSAEGLHYLTGNKHFNPELPFSRQEFITVKPQKQQGMSISGFQPKLQLIIEDDHFNSINQQGNYILKPSPEEYPFLAENEHATMRIMKELGFDVPENGLVSFAGEQNHKEFAFVIKRFDRDKQQKTMHQEQLDGAMNIRDKYGKIGADNEQYVSYEQIAKSLFCSTQKII

SEQ ID NO: 1389 - DNA, 321 bp, Haemophilus influenzae
atgcgcgatttagtccgctcgggaaaagtatttctctacggtgaatttattggcttacttagagaagatcatcgtggttttcattttgcttacaatcccgattatcaaggaataccgctctctctcagctttcctattgagcaaagcccttttcattctgacaccttattcccttattttgcatcgctagtcccagaaggctggctaaaacacaaatatgcatttcatcaacgaattgatgaaggtgatatgtttcgctttttacttaataatggtgaaaatatgttaggtgcagtgcaaattcaggaggaaaaacaatga

SEQ ID NO: 1390 - protein, 106 aa, Haemophilus influenzae
MRDLVRSGKVFLYGEFIGLLREDHRGFHFAYNPDYQGIPLSLSFPIEQSPFHSDTLFPYFASLVPEGWLKHKYAFHQRIDEGDMFRFLLNNGENMLGAVQIQEEKQ

SEQ ID NO: 1391 - DNA, 309 bp, Haemophilus influenzae
atgaataaccttagtgcacaattagaaaatcaaattgatgaattaaaaaagcttcagaaatcagtcattacctatgaacaagcgcaaagacaactactttacgcagggaaaattaccgatctcaaagcatttggaaaaatgctcaatgataagcgtaaatcacttggtattgagcttagtatgctagaactgcaaactggcgtgtctatttctaccttgaaccgattatttcaagatccaagccaagtgagatttacaaccgtgtttcttgttgctcaaacattaggggtttcactatgcgcgatttag

SEQ ID NO: 1392 - protein, 102 aa, Haemophilus influenzae
MNNLSAQLENQIDELKKLQKSVITYEQAQRQLLYAGKITDLKAFGKMLNDKRKSLGIELSMLELQTGVSISTLNRLFQDPSQVRFTTVFLVAQTLGVSLCAI

SEQ ID NO: 1393 - DNA, 1002 bp, Haemophilus influenzae
atgaatcgagcattagccatcgaattttcacgagtaacagaagccgccgctctagcagcttacacgtggcttggtcgaggagataaaaatgcggcagacgatgcagcggtaaaagcgatgcgttatatgctgaatttgattcatatggacgctgaaatcgttataggagagggcgaaattgatgaagccccaatgctttatgttggcgaaaaagtcggttctggcttaggggaattagtttctatcgcagtagatcctattgatggtacacgtatgaccgcaatggggcaatctaatgctatttctgtcttggctgcaggtggcaaaaatacctttttaaaagcacctgatatgtatatggaaaaattagtggtgggttcaaatgtaaaaggcatcattgatttgaatttaccactggaacaaaatcttcgccgcatcgcatctaagctaggaaaatccctttctgaccttaccgtaatggtattagcaaaaccacgtcacgatgccgtaattaaacaaatacataacttgggtgcgaaagtattggcaattcctgatggcgatgtggcaggttctgtgctttgctgcttacctgatgctgaagtcgatcttctttatggaattggtggtgcgccagaaggcgtggcagctgctgcagccattcgcgcattaggtggcgatatgcaagctcgtttaatcccacgcaatgaagtaaaaagcgacaccgaagaaaataaaaaaattgcagctaatgagattcaacgctgtgcagcattgggcgtaaaagtgaatgaagtgttaaaacttgaagatctcgtgcgtgatgacaatcttgtatttactgcaacaggcattaccaatggcgatttgcttaaaggcatttcccgaaaaggcaatttagccagcactgaaaccattttaattcgaggaaaatcccgcacaattcgtaaaattcaatccattcattatttggatgacctttataaaattttgaatatttag

SEQ ID NO: 1394 - protein, 333 aa, Haemophilus influenzae
MNRALAIEFSRVTEAAALAAYTWLGRGDKNAADDAAVKAMRYMLNLIHMDAEIVIGEGEIDEAPMLYVGEKVGSGLGELVSIAVDPIDGTRMTAMGQSNAISVLAAGGKNTFLKAPDMYMEKLVVGSNVKGIIDLNLPLEQNLRRIASKLGKSLSDLTVMVLAKPRHDAVIKQIHNLGAKVLAIPDGDVAGSVLCCLPDAEVDLLYGIGGAPEGVAAAAAIRALGGDMQARLIPRNEVKSDTEENKKIAANEIQRCAALGVKVNEVLKLEDLVRDDNLVFTATGITNGDLLKGISRKGNLASTETILIRGKSRTIRKIQSIHYLDDLYKILNI

SEQ ID NO: 1395 - DNA, 219 bp, Haemophilus influenzae
atgtctttagaaattttagaccagcttgaagaaaaaattaaacaagcggtagaaactatccaattacttcaattagaagttgaagaattaaaagagaaaaacgcagaatctcaaagaaatatcgaaaacttacaaactgaaaatgaacagctgaaaaacgaacatcgtaattggcaagagcatattcgttcattacttggtaagtttgataacgtttaa

SEQ ID NO: 1396 - protein, 72 aa, Haemophilus influenzae
MSLEILDQLEEKIKQAVETIQLLQLEVEELKEKNAESQRNIENLQTENEQLKNEHRNWQEHIRSLLGKFDNV

SEQ ID NO: 1397 - DNA, 441 bp, Haemophilus influenzae
atgcacatttgcattctttcaggcagcactttaggtggtgcggaatatgttgccgagcatttaaacgatgttttagaaactcaaggtttctccaccgcactttttcacggaccaaatttatctgacattgaaaacgagaaaatttggctgattgttacttcaacgcatggtgcaggcgaattgccagacaatttaaaacctctatttgatgaattagcgaatagccaaaaggatttttcagatgttcgctttgcggtcgttggattaggtagttctgattatgatactttttgctatgcagcggacaaagtggagcaaacacttcaagcaaaaagtgcggtaaaaatttgtgagactttaaaaattgacgtgttaaacgtggatgatcaagaaagttatgctgaagaatggttaccgagttttattgagggattgaaatga

SEQ ID NO: 1398 - protein, 146 aa, Haemophilus influenzae
MHICILSGSTLGGAEYVAEHLNDVLETQGFSTALFHGPNLSDIENEKIWLIVTSTHGAGELPDNLKPLFDELANSQKDFSDVRFAVVGLGSSDYDTFCYAADKVEQTLQAKSAVKICETLKIDVLNVDDQESYAEEWLPSFIEGLK

SEQ ID NO: 1399 - DNA, 435 bp, Haemophilus influenzae
atgatcgccctaattcagcgtgtgtctcaagcaaaagtggatgtaaatggcgaaacaatagggaaaattggcaaaggtttgttagttttgcttggcgtagaaaaagaagataaccgagaaaaagcggataaactcgctgaaaaagtgcttaattatcgaattttcagtgatgaaaatgacaaaatgaatttaaatgttcaacaagcgcagggggaattacttatcgtttcgcaatttacattagcagcggatacgcaaaaaggtttacgcccgagtttttcaaaaggtgcgtccccagcattggctaatgaattatatgaatactttattcaaaagtgcgcagagaaattacctgtttcaacagggcaatttgcagcggatatgcaagtgaacttaacaaatgatgggcctgtgacgttttggttaaatgtataa

SEQ ID NO: 1400 - protein, 144 aa, Haemophilus influenzae
MIALIQRVSQAKVDVNGETIGKIGKGLLVLLGVEKEDNREKADKLAEKVLNYRIFSDENDKMNLNVQQAQGELLIVSQFTLAADTQKGLRPSFSKGASPALANELYEYFIQKCAEKLPVSTGQFAADMQVNLTNDGPVTFWLNV

SEQ ID NO: 1401 - DNA, 477 bp, Haemophilus influenzae
atgatcagaattggacacggctttgatgttcacgcttttggcgaagatcgtccattaattattggtggtgtagaagtgccttatcatacgggctttattgcgcactcagatggcgatgtggcattacacgcattaactgatgcaatcttaggggctgcggctttaggcgatattggaaaacttttccccgatactgatatgcaatataaaaatgcggatagtcgaggcttactgcgtgaagcgtttcgtcaagtacaagaaaagggatataaaataggtaatgttgatattaccatcatcgctcaagcacctaaaatgcgcccacatattgatgcaatgcgtgccaaaatagctgaagatatccaatgcgatattgagcaagttaatgtaaaagcaacgactaccgaaaaattaggctttacaggaagacaagaggggattgcttgtgaagccgttgctcttttaatccgacaataa

SEQ ID NO: 1402 - protein, 158 aa, Haemophilus influenzae
MIRIGHGFDVHAFGEDRPLIIGGVEVPYHTGFIAHSDGDVALHALTDAILGAAALGDIGKLFPDTDMQYKNADSRGLLREAFRQVQEKGYKIGNVDITIIAQAPKMRPHIDAMRAKIAEDIQCDIEQVNVKATTTEKLGFTGRQEGIACEAVALLIRQ

SEQ ID NO: 1403 - DNA, 678 bp, Haemophilus influenzae
atggctcgttcaattattgcggtcttgccagctgctggcgtgggttcacggatgcaagcggataaaccgaaacaatatttaacgctgcttggcaaaacactgcttgaacaaacactcgatgtgatgctttcttatcctgccgtatctaaaattatcttggcggtaagcaaagatgatccttatatttctacactatcgctcgatcctaaaattcagttagtggaaggtggcacaacgcgagctgaatctgtcttaaatggtttaaatgcaattgcggaaaaaaatgcctgggtgcttgttcatgatgctgcccgcccttgtttacaacatgctgatattgataaattgttagctattgaagataaacaaggtgcgattttggcaatcccagtaacagatacgattaaacgagcggacaatcagcaatgtattgtaaaaacagaagatcgtagccagctttggcaagcaatgacaccgcagtttttcccagtagatatattaagagatgcgctttccacaggaattcaacaaggtgcgaatataacagatgaagcatcagcaatagaacttgctggatttcgaccgcacttagtggctggacgtagcgataatttaaaagtaactcttccagaagatttagcattagcagaattttatttaacaaggaataaattatga

SEQ ID NO: 1404 - protein, 225 aa, Haemophilus influenzae
MARSIIAVLPAAGVGSRMQADKPKQYLTLLGKTLLEQTLDVMLSYPAVSKIILAVSKDDPYISTLSLDPKIQLVEGGTTRAESVLNGLNAIAEKNAWVLVHDAARPCLQHADIDKLLAIEDKQGAILAIPVTDTIKRADNQQCIVKTEDRSQLWQAMTPQFFPVDILRDALSTGIQQGANITDEASAIELAGFRPHLVAGRSDNLKVTLPEDLALAEFYLTRNKL

SEQ ID NO: 1405 - DNA, 426 bp, Haemophilus influenzae
ttgttccacctctctctagaaaataatttttatacaaaaagtgcggttaaaataaaagaatttttaaccgcactttctttcattttatcgtttttcctaatttttcacggtaaacaggttaaaattttactcacaataaatatccgtatgcgacttcttattttaatccttctttcagtattagtattgtttcaatataatttttggtttggcagtaacggttttttagattatcgtcaaaatgctgagaaaattaaggaaaatcaagcagaaaatgaaaagctatctcaacgtaatcagcgtattaatgcagaaattcaaggattaacaaaaggttttgaagcgatcgaagaacgcgcacgaatgcaacatggcttagtgaaagaaaatgaagtgttctatcatattgtaaaagagagtaaataa

SEQ ID NO: 1406 - protein, 141 aa, Haemophilus influenzae
MFHLSLENNFYTKSAVKIKEFLTALSFILSFFLIFHGKQVKILLTINIRMRLLILILLSVLVLFQYNFWFGSNGFLDYRQNAEKIKENQAENEKLSQRNQRINAEIQGLTKGFEAIEERARMQHGLVKENEVFYHIVKESK

SEQ ID NO: 1407 - DNA, 468 bp, Haemophilus influenzae
atgagcgaaaaatatgtggtaacttgggatatgtttcaaatgcatgcccgcagattatcagaacgtttacttccagcttcccaatggaaaggtattattgcggtgagtcgcggtggtttgtttccagcggctgtattggctagagaattgggtcttcgtcatattgaaaccgtttgtatcgcaagttatcacgatcataacaatcaaggtgaattacaagttcttcatgcagcccaagtgccaaatggcggcgaaggatttatcgtggtagatgatttagttgatacgggtaatacggcgcgtgcgattcgtcaaatgtaccctaatgcaaaatttgtcactgtatttgcaaaacctgcaggtgcggaattagtggatgattacgtaattgatattccacaaaatacttggattgagcaaccttgggatttaggtttaacctttgttccacctctctctagaaaataa

SEQ ID NO: 1408 - protein, 155 aa, Haemophilus influenzae
MSEKYVVTWDMFQMHARRLSERLLPASQWKGIIAVSRGGLFPAAVLARELGLRHIETVCIASYHDHNNQGELQVLHAAQVPNGGEGFIVVDDLVDTGNTARAIRQMYPNAKFVTVFAKPAGAELVDDYVIDIPQNTWIEQPWDLGLTFVPPLSRK

SEQ ID NO: 1409 - DNA, 1455 bp, Haemophilus influenzae
atgtctgaaattacaacacttcaaccttcactgttatggaaatggttcgatcaaatttgtgcaatccctcatccttctcattatgaagatacgttagctaactttattgtaaattgggcaaaagaaaagcatttttttgttgaacgcgatgaagtaggtaatgtcctcattcgtaaacctgcaacaaaaggaatggaaaatcacacacctgttgtgctacaagcccatctagatatggtgccacaggctaatgaaggcaacccacatgattttaccaaagatccaattcaaccttatatcgatggagaatgggtaaaagcacgaggtaccacattaggagctgacaatggtatcggtttagcctctactttagcggtgttagaaagcaatgatttagcccatccacctcttgaagtgcttttaacaatgacagaagaaacaggcatggatggtgcgaaaggcttacgtcataactggttacaatctgaaattttaatcaatacagataccgaagaaattggcgaaatttacattggttgtgcgggcgggattaacgcaaactttgaaattcccgttcaatatgaaaccaatacgtttgagcacagcgtacaaatcacccttaaaggtttacgtggcggtcactctggtggcgatatccatacagggcgcgcaaatgcaattaaagtgttagcgcgagtattagcaaaactctctcaaaatcaaccgcactttgctctctctgaaattcgtggtggctcaattcgtaatgcaattcctcgagaagcagcagctgtgttagcctttaatggcgatgtaaaaaccatagaaagtgcggtagaaaatctagcggttgtgcttaaagaagaattagcaattgcagaacctaatttcacactttttgtagaatccgcagaaaaagctcctaccgtattcaccgcacaaagcactcaaacggtaattaacgcactcaacgtattgccaaacggcgttatccgcaatagtgatgtagttaaaaatgtcgtagaaagctcattaagcgttggcgtattgaaaacagaaggtaatgttgtaaaaagcactattttagttcgttcattaattgaaagcggtaaatattacgtaactgaaatgcttagctcacttgcaatcttagcaaatgcaaaagtcgagttttctgcaccttatccgggctggcaacctgtaaatgactctactatcttagacgttactcgcaaacattatgctgaagtgctaggcgagcaacctgtagtgaaagtcattcacgcaggattagaatgtggtcttttaaaagaacattatccaaacattgaaatgatttctgttgggccaacaatacgaaatgctcactcaccagatgaaaaagtggaaatcgcaacagtacaaacctattgggatttattgacaagagtacttgccgatattcctgcgaagtaa

SEQ ID NO: 1410 - protein, 484 aa, Haemophilus influenzae
MSEITTLQPSLLWKWFDQICAIPHPSHYEDTLANFIVNWAKEKHFFVERDEVGNVLIRKPATKGMENHTPVVLQAHLDMVPQANEGNPHDFTKDPIQPYIDGEWVKARGTTLGADNGIGLASTLAVLESNDLAHPPLEVLLTMTEETGMDGAKGLRHNWLQSEILINTDTEEIGEIYIGCAGGINANFEIPVQYETNTFEHSVQITLKGLRGGHSGGDIHTGRANAIKVLARVLAKLSQNQPHFALSEIRGGSIRNAIPREAAAVLAFNGDVKTIESAVENLAVVLKEELAIAEPNFTLFVESAEKAPTVFTAQSTQTVINALNVLPNGVIRNSDVVKNVVESSLSVGVLKTEGNVVKSTILVRSLIESGKYYVTEMLSSLAILANAKVEFSAPYPGWQPVNDSTILDVTRKHYAEVLGEQPVVKVIHAGLECGLLKEHYPNIEMISVGPTIRNAHSPDEKVEIATVQTYWDLLTRVLADIPAK

SEQ ID NO: 1411 - DNA, 888 bp, Haemophilus influenzae
atgctaacagcgttaaatcgttattgggattatttgcggattgaacgccaaatgagtcctcacacacttaccaattatcaacatcagcttgatgccaccatcaaaatcttagcgcaacaagatattcattcttggacacaagtgacgcctagcgtggtgcgctttattttagcggaaagcaaaaaacaaggcttaaaagaaaaaagcttggctttgcgtttatctgcattgcgtcgatttctcagttttttagtgcaacaaggcgaattaaaagtaaatcctgccacaggcatttctgcaccgaaacaaggcaggcatttaccgaaaaatatggatggcgagcaagttcaacaattgcttgccaacgatagcaaagagccaattgatattcgtgatcgtgctattttggaattaatgtatagttcaggtttgcgtttatctgaattacaaggcttagatttaaacagcattaatacccgtgtgcgggaagtacgcgttatcgggaaaggtaacaaagaacgagttgtgccgtttgggcgttacgcttcgcatgccattcaagaatggttaaaagtgcgggcattatttaacccaaaagatgaggcattatttgttagccagcttggaaatcgcatttctcatcgagctattcaaaaacgtttagaaacttggggtattcgtcaaggcttaaatagccatcttaatccgcacaaattacgtcattcttttgcgacgcatatgttggaagccagttctgatttacgcgccgtgcaagaattgcttgggcatagcaacctttccaccacacaaatttatactcacttaaatttccaacatctggcagaagtgtacgatcaggcgcacccaagagcgaaacgaaaaaaataa

SEQ ID NO: 1412 - protein, 295 aa, Haemophilus influenzae
MLTALNRYWDYLRIERQMSPHTLTNYQHQLDATIKILAQQDIHSWTQVTPSVVRFILAESKKQGLKEKSLALRLSALRRFLSFLVQQGELKVNPATGISAPKQGRHLPKNMDGEQVQQLLANDSKEPIDIRDRAILELMYSSGLRLSELQGLDLNSINTRVREVRVIGKGNKERVVPFGRYASHAIQEWLKVRALFNPKDEALFVSQLGNRISHRAIQKRLETWGIRQGLNSHLNPHKLRHSFATHMLEASSDLRAVQELLGHSNLSTTQIYTHLNFQHLAEVYDQAHPRAKRKK

SEQ ID NO: 1413 - DNA, 441 bp, Haemophilus influenzae
atgaaacttttcaaagctgaacaatggaatattgaagtgcttcttcctctttttgaaacctatcgccaagcctatgggcaagcagagaatccagaacgcactttggcttttttaactaatcgtatgcgttttaatgaaagcctgttttttattgcggtggatgaaaatgaaaaggctattggctttgtgcagcttttccctcgtctttcttctttacaattacaacgctattggcaaatcaccgatatttttgtgttggaacatgcgcaacaaacagaaatttatgcggcgttgatttctaaagcaaaagactttgtgcatttcacgcaatccaatcgtttagtggcagaattagcgcaaaatcaatattcaatgttggaatcggaagggtttaaattaaacccgaaagaacgtttatttgaattgagtttgtcatgctaa

SEQ ID NO: 1414 - protein, 146 aa, Haemophilus influenzae
MKLFKAEQWNIEVLLPLFETYRQAYGQAENPERTLAFLTNRMRFNESLFFIAVDENEKAIGFVQLFPRLSSLQLQRYWQITDIFVLEHAQQTEIYAALISKAKDFVHFTQSNRLVAELAQNQYSMLESEGFKLNPKERLFELSLSC

SEQ ID NO: 1415 - DNA, 792 bp, Haemophilus influenzae
atggcacgtcgtcctttagttatgggtaactggaaattaaacggtagcaaagcattcacgaaagaattaatcgagggattaaaagcggaattacatgatgtaacaggttgtgatgtagcaattgccccccccgttatgtatttaggtacggctgaagcagcactttctggttgtggttgcagctgtggcggtaaaagtgtgattcaattaggtgcacaaaacgtagatatcaatgtgaaaggtgcatttactggtgatatttctagcgaaatgttaaaagattttggtgcaaaatacatcattattggccactctgaacgccgcacttatcataaagaaagcgacgaatttgtggcgaaaaaatttggtgcattaaaagaagctggtttagtgccagtattatgtattggtgaatctgaagcagaaaacgaagcaggcaaaacagaagaagtatgtgcgcgtcaaattgatgcagtcatcaatgcattaggcgtagaagcattcaacggtgcagtgatcgcatacgaaccaatctgggcgattggcacgggtaaatctgcgactccagcacaagcgcaagcagttcacgcatttatccgtggtcacatcgcagcgaaatcacaagccgtggcagagcaagtaattattcaatacggcggttctgtaaatgatgcaaatgccgctgaattatttactcagccagacatcgatggtgcattagtgggtggcgcatcattaaaagcccctgcatttgcagtaattgttaaagcagcagctgcagcgaaaaactaa

SEQ ID NO: 1416 - protein, 263 aa, Haemophilus influenzae
MARRPLVMGNWKLNGSKAFTKELIEGLKAELHDVTGCDVAIAPPVMYLGTAEAALSGCGCSCGGKSVIQLGAQNVDINVKGAFTGDISSEMLKDFGAKYIIIGHSERRTYHKESDEFVAKKFGALKEAGLVPVLCIGESEAENEAGKTEEVCARQIDAVINALGVEAFNGAVIAYEPIWAIGTGKSATPAQAQAVHAFIRGHIAAKSQAVAEQVIIQYGGSVNDANAAELFTQPDIDGALVGGASLKAPAFAVIVKAAAAAKN

SEQ ID NO: 1417 - DNA, 318 bp, Haemophilus influenzae
atgtcatttaaagaaataactccacagcaagcttgggaaatgatgcaacaaggcgcaatattagtcgatattcgagataatatgcgctttgcttattcacatcctaaaggtgcttttcatttaacaaatcaaagttttttgcaatttgaagaactagcagattttgattcgcctattattgtgagttgttatcacggcgtgagcagtcgaaatgtagcgacttttctcgtggaacaaggctataaaaatgtatttagtatgattggcggatttgatggatggtgcagagcagaattaccgattgataccacttactaa

SEQ ID NO: 1418 - protein, 105 aa, Haemophilus influenzae
MSFKEITPQQAWEMMQQGAILVDIRDNMRFAYSHPKGAFHLTNQSFLQFEELADFDSPIIVSCYHGVSSRNVATFLVEQGYKNVFSMIGGFDGWCRAELPIDTTY

SEQ ID NO: 1419 - DNA, 879 bp, Haemophilus influenzae
atgtttaaaggtattctcgtttcattattagcctcgtttttatttggctatatgtattatttttctacgttactaaaacctttgagtggcacggatattttcggttatcggatgatatttacttttccttttgtcctgttgtccgtcacattatttaaacaaaaagcagctttaattgaacgtttaaaacgcattcaaaaacgaccgcacttagcattgtcatatttactttgcggattattaatgggttttcaaatgtggctttttctttgggcaccgaataatggcagttcattaagcgtatcttttggttatctacttttaccaattgtaatggtggcggcaggtcgcgtgttttttaaagaacgcatttcaacattcaaatttattgcagttatcattgcaacattaggcgtaatttctaatattgtgctaaaaggtggtctttcttgggaagccattgttatctgtttaggttacaccgcatatttttctatccgaaaagcattaaaaaataccgatcttgcctccttttgtttagaaatgttaagccttatgcctgtcagtatttattttgctttacaaacagatttcgcgacagtacagcaaaccaatccgtttatttgggggctgcttgtattactaggattaatcagcggtactgcgttaattgcctatgtaatagccagtaatatgcttcctatgaatttactcggtctgcttggttatgttgaaactattatgatgctatgcgtatcatttttgatcggagaacaaattgatagcgaaagctacccactttttatttgtttagtcatcgcgatgattcttgttatggttgatggcgtttacaaacaacacgcaaaaggaagtttataa

SEQ ID NO: 1420 - protein, 292 aa, Haemophilus influenzae
MFKGILVSLLASFLFGYMYYFSTLLKPLSGTDIFGYRMIFTFPFVLLSVTLFKQKAALIERLKRIQKRPHLALSYLLCGLLMGFQMWLFLWAPNNGSSLSVSFGYLLLPIVMVAAGRVFFKERISTFKFIAVIIATLGVISNIVLKGGLSWEAIVICLGYTAYFSIRKALKNTDLASFCLEMLSLMPVSIYFALQTDFATVQQTNPFIWGLLVLLGLISGTALIAYVIASNMLPMNLLGLLGYVETIMMLCVSFLIGEQIDSESYPLFICLVIAMILVMVDGVYKQHAKGSL

SEQ ID NO: 1421 - DNA, 879 bp, Haemophilus influenzae
atggaatttaccgacctacaaatattcatccacctcagtgatacaaaaaacttcaccaaaaccgccacccaaaaccacatgtctccctctaccctttcccgtcaaattcaacgattggaagacgagttaggaaagacactttttattcgtgataatcgccaagtcaaacttactgaatatggcgagaaatttttgcaatttgctaaaacagaatggcaaaactggcaacaatttaaacaacaactgaaagatgaatccgatgaactttgcggtgaaattaaacttttttgttctgtaaccgcatcttatagccatcttcctcacgtacttaaacagtttcgccagcgttatcctaaagtggaaattcaactgactacgggtgatccagcgttagcactagaattaattcaagcacaacaagtcgatctcgcgcttgcggggaaaccaaataatctgccctctagtgtagtgtttcataaaatagatgatattagtttgtccctaattgccccgcgagtggcttgtttggcgacacaattattgcaagaaaaacctattgattggcagcaaatgccttttatttttcctgttgaagggcacgctcggcagcgaattgaacaatggttaagagagaaacaaattaaacacccgaaaatttatgctactgttgcgggacacgaaggaattgtgccaatggtgggattaggatttggattagcaatgttgcctgatgcagtaattgacagcagcccaatgaataaccaaatttccagacttaatcttgataaacctattgagccttttgaattaggtatttgcacccaaaaaagaaatctcgaacagcccctagtccgtgcattttgggcgatgttagaatag

SEQ ID NO: 1422 - protein, 292 aa, Haemophilus influenzae
MEFTDLQIFIHLSDTKNFTKTATQNHMSPSTLSRQIQRLEDELGKTLFIRDNRQVKLTEYGEKFLQFAKTEWQNWQQFKQQLKDESDELCGEIKLFCSVTASYSHLPHVLKQFRQRYPKVEIQLTTGDPALALELIQAQQVDLALAGKPNNLPSSVVFHKIDDISLSLIAPRVACLATQLLQEKPIDWQQMPFIFPVEGHARQRIEQWLREKQIKHPKIYATVAGHEGIVPMVGLGFGLAMLPDAVIDSSPMNNQISRLNLDKPIEPFELGICTQKRNLEQPLVRAFWAMLE

SEQ ID NO: 1423 - DNA, 165 bp, Haemophilus influenzae
ttgaaagtcgcaaaggcgatttatatggggcataatttaccttggtgttatttaaaaagtgcggttagttttgcattcgtttttaaatttaagaaagaacaaaatgggttcccttctttgccgcctgaaaaattggaaatttgtaggaaattttcgtctgtttga

SEQ ID NO: 1424 - protein, 54 aa, Haemophilus influenzae
MKVAKAIYMGHNLPWCYLKSAVSFAFVFKFKKEQNGFPSLPPEKLEICRKFSSV

SEQ ID NO: 1425 - DNA, 1479 bp, Haemophilus influenzae
atggctaactatttcaacacattaaatttacgtcaaaaattagaccaattaggtcgttgtcgttttatggatcgcgaagaatttgcagatgaagcaaacttcttaaaaggcaaaaaaatcgttatcgtgggctgtggtgcgcaaggtttaaaccaaggtttgaatatgcgtgattctggcttagatattagctatgccttacgcccagaagcgattgcagaaaaacgtgcatcgttccaacgtgcaaccgaaaatggttttaaagtgggtacttatgaagaattaattccaactgcagatttagtcgtaaacttaacaccagacaaacaacactctaaagtagttgtcgatgtcatgcctttaatgaaaaaagactctgcatttggttattcacacggattcaatattgttgaagttggcgaagaaatccgtaaagatattacggttgtgatggttgcgccaaaatgtccaggtactgaagttcgtgaagaatacaaacgtggtttcggtgtgccaacattaatcgcggttcatcctgaaaatgacccgaaaggcgaaggcatggcgatcgcaaaagcatgggctgctgcaactggcggtcataaagcaggtgttttagaatcttcattcgtggcagaagtaaaatctgacttaatgggtgagcaaactatcctttgcggtatgttacaagcaggctctatcgtatgttatgacaaattagtggcagatggtaaagatcctgcatacgcaggtaaattaatccaatacggttgggaaaccattaccgaagcgttaaaacaaggcggtatcacattaatgatggatcgcttatcaaacagcgcaaaattacgtgcatttgaactagctgaacaaatcaaagaaagccttggtttcttatattacaaacacatggatgacatcattagcggtcacttctctgcaacaatgatggctgactgggcaaatggcgataaagatttattcgcatggcgtgaagcaacaggtaaaacagcctttgaaaatgcgccaaaatatgatggcaaaattagcgaacaagaatattttgataacggcgtattaatgatcgcaatggttaaagctggtgtagaattagcttttgaagcaatggttgcaagcggtatttatgaagaatcagcttactacgaatcacttcacgaattaccattaattgcgaacaccatcgcacgtaaacgcttatacgaaatgaacgtggtaatttctgataccgcagaatatggtaactacttattctctaacgtagcgaccccaattcttgcaaaagaaattatccctaaccttcaaaaaggcgatttgggcgagccaactccagcagtggaagtcgataacattaccttacgtgatgtaaacgatgcaattcgcaaccaccctgttgaattaatcggtcaagaattacgtggttatatgacagatatgaaacgtatcgcagttgcaggttaa

SEQ ID NO: 1426 - protein, 492 aa, Haemophilus influenzae
MANYFNTLNLRQKLDQLGRCRFMDREEFADEANFLKGKKIVIVGCGAQGLNQGLNMRDSGLDISYALRPEAIAEKRASFQRATENGFKVGTYEELIPTADLVVNLTPDKQHSKVVVDVMPLMKKDSAFGYSHGFNIVEVGEEIRKDITVVMVAPKCPGTEVREEYKRGFGVPTLIAVHPENDPKGEGMAIAKAWAAATGGHKAGVLESSFVAEVKSDLMGEQTILCGMLQAGSIVCYDKLVADGKDPAYAGKLIQYGWETITEALKQGGITLMMDRLSNSAKLRAFELAEQIKESLGFLYYKHMDDIISGHFSATMMADWANGDKDLFAWREATGKTAFENAPKYDGKISEQEYFDNGVLMIAMVKAGVELAFEAMVASGIYEESAYYESLHELPLIANTIARKRLYEMNVVISDTAEYGNYLFSNVATPILAKEIIPNLQKGDLGEPTPAVEVDNITLRDVNDAIRNHPVELIGQELRGYMTDMKRIAVAG

SEQ ID NO: 1427 - DNA, 1281 bp, Haemophilus influenzae
atggataataatattcaacgactcattgatagtgcaaaacaatcccttaattcgcctaaaagccataaatatattgatgaaagttttgaaagctgtattaaatgtactgcttgtactgctgtttgtcctgtttcacgtaataatccgctttatccagggccaaaacaatcagggcctgatggcgagcgtttacgcttaaaatctgctgaactttatgatgaagcacttaaatattgcaccaactgtaaacgttgtgaagtggcttgtccgtctgatgtgaaaattggcgatttaattgtacgtgcgcgtaataatcacttagcgcagtctaaaaaaccgttaatgaataaattgcgtgatgcgattttaagtaacaccgatgtaatggggaaaatcaatactccacttgcccccattgtgaacaccattacgggtctgaaagccaccaaatttatgttggaaaaaacccttaatatcagtaagaaacgtactttacctaaatatgcgtttggtacgttccgtagctggtatatgaaaaatgcgctacaagaccaacaaaaatttgagcgaaaagtagcatatttccacggttgttatgttaattataataatccacagcttggcaaagaattccttaaagtgttcaatgcgatgaacattggggtaatgttattagaaaaagaaaaatgctgtggcttaccattaatggtaaacggttttcctaatcgcgctcgtaatattgcacaattcaataccgattacattggaaaaatggtagatgaaaatggaatagatgtgattagtgaagcatcaagttgttcacttaatctgcgtgacgaataccatcatattttaggtatcgataacgccaaagtccgtccgcatatccatatggtaaccccatttttatatcagcttttcaaagagggtaaaacattaccgttgaaaccacttaaacttagagtggcttatcacactgcctgtcacgtagataaagcaggttgggcaccttatactttggaagtgttgaaaaaaattccgggtttagaaatcattatgttacctagccaatgctgtggtattgcagggacttacggttttaaatcagaaaactatgaaatttcacaatctattggtaaaaatctattcgataatattaacgagggtggatttgattacgttatatctgaatgtcaaacctgtaaatggcaaattgatatgtcatctaacgtgacttgtattcatccattaactttactttgtatgtcgatggatgcttaa

SEQ ID NO: 1428 - protein, 426 aa, Haemophilus influenzae
MDNNIQRLIDSAKQSLNSPKSHKYIDESFESCIKCTACTAVCPVSRNNPLYPGPKQSGPDGERLRLKSAELYDEALKYCTNCKRCEVACPSDVKIGDLIVRARNNHLAQSKKPLMNKLRDAILSNTDVMGKINTPLAPIVNTITGLKATKFMLEKTLNISKKRTLPKYAFGTFRSWYMKNALQDQQKFERKVAYFHGCYVNYNNPQLGKEFLKVFNAMNIGVMLLEKEKCCGLPLMVNGFPNRARNIAQFNTDYIGKMVDENGIDVISEASSCSLNLRDEYHHILGIDNAKVRPHIHMVTPFLYQLFKEGKTLPLKPLKLRVAYHTACHVDKAGWAPYTLEVLKKIPGLEIIMLPSQCCGIAGTYGFKSENYEISQSIGKNLFDNINEGGFDYVISECQTCKWQIDMSSNVTCIHPLTLLCMSMDA

SEQ ID NO: 1429 - DNA, 1299 bp, Haemophilus influenzae
atgaattttgatgtagccattattggcggtggtttggcgggtttaacctgtggcatcgcccttcaacaacgcggcaaacgttgcgtgattatcaacaacggtcaagcggccattgattttgcatctggctctttagatttattaagccgtatgccatcaacgacatatggggaaaaccgcgcagtagaaaatttaaaagaaaatattaccgcacttcgcaatgaattacctgctcatccttatagtttattgggtgcagagaaagtgcttgctaaagcacaagattttgaacgtttagccaatgaattaaatcttgatttaattggttctacggaaaaaaatcactggcgtgtaacaggcttaggcagtttacgtggtgcgtggctttcgccaaatagcgtgccaactgtgcaaggtaatgaaccctttccgcataaacgtattgcagtgcttggtattgaaggttatcacgattttcaacctcaacttttagcggcaaatttagtgttaaacccacaatttgaacattgtgaagtaacgagtggtttcttaaatattccacaattagatgaacttcgcaaaaatgctcgtgagttccgtagtgtaaatatctctcaacttctagagcacaaacttgcgttcaatgatcttgttaaagaaatcattgaatcagcgcaaggtgcagaagcggtctttttacctgcttgctttggtttagaaaaccaagaatttatgaccgcacttcgtgatgcaactaaacttgcattatttgaattaccaacactgccaccatcattacttggtatgcgccaacgaatccaattacgccataaatttgaatccttgggtggtttaatgattaatggcgacagtgcattgaatgcaacatttgaaggaaataaagtacgttgtatcaatactcgtttactagaaaatgaagaaatcactgcagataattttgtattggcgtcaggaagtttcttcagcaaagggcttatttccgaatttgataaaatttatgaaccagtttttgaatccgatattatcggtgttgaagggtttaacgataaagatcgtttcacttggactgctcatcgctttgctcatccacaaccttatcaatcagcaggcgtagcgattaatgcccagtgccaagtgaaaaagtgcggtcaatttttaacgaatttatatgccgtcggtaatgtgattggtggttttaatgcccttgaacttggttgtggttcgggtgtggctgttgtaactgccttggcagtggcagatgaaatcttagcgaaataa

SEQ ID NO: 1430 - protein, 432 aa, Haemophilus influenzae
MNFDVAIIGGGLAGLTCGIALQQRGKRCVIINNGQAAIDFASGSLDLLSRMPSTTYGENRAVENLKENITALRNELPAHPYSLLGAEKVLAKAQDFERLANELNLDLIGSTEKNHWRVTGLGSLRGAWLSPNSVPTVQGNEPFPHKRIAVLGIEGYHDFQPQLLAANLVLNPQFEHCEVTSGFLNIPQLDELRKNAREFRSVNISQLLEHKLAFNDLVKEIIESAQGAEAVFLPACFGLENQEFMTALRDATKLALFELPTLPPSLLGMRQRIQLRHKFESLGGLMINGDSALNATFEGNKVRCINTRLLENEEITADNFVLASGSFFSKGLISEFDKIYEPVFESDIIGVEGFNDKDRFTWTAHRFAHPQPYQSAGVAINAQCQVKKCGQFLTNLYAVGNVIGGFNALELGCGSGVAVVTALAVADEILAK

SEQ ID NO: 1431 - DNA, 1734 bp, Haemophilus influenzae
  misc_feature 4, 5, 6, 7, 8: n is any nucleotide
atgnnnnnattttttcttaattttgggatcgggggtaaacaatgggattatcgcctagtatctataaaagatgttggagatctttcgtcacttagcactgatgtgatcattatcggtggtggcgcaacaggagcaggtattgcgcgcgattgtgcacttcgtggcattgattgtattttattggaacgtcgagatattgcgacaggagccacaggacgtaaccacggattattacacagtggtgcgcgttacgccgtgaacgaccaagaatctgctgaagaatgtattaaagaaaaccgcattttgcgcaaaattgcgcgtcattgcgtagatgaaacggaaggcttatttatcactttgcctgaagattcgctcgactatcaaaaaaccttccttgagagctgtgcaaaatctggaattgatgcacaagccattgatcctgaactagctaaaattatggagccttctgtaaatcctgatttagtgggcgctgttgttgtgccagatggttctattgacccattccgtttaaccgcctctaatatgatggacgccacagaaaacggcgcaaaaatgttcacttattgcgaagtaaaaaatttgattcgtgaaggtggaaaagtgattggcgtgaatgtgtacgatcacaaaaatcgcagagaacgccaattttttgcaccgcttgttgtaaatgctggtggtatttggggacaagggattgcggaatatgccgatctcaaaattaaaatgttccctgcaaaaggcgcattactcgtaatgggtcatcgcattaataaacttgtaattaaccgctgccgtaaacctgctgatgcggatattctcgtccctggcgatacaatttgtgtgattggtacaacgtcaagtcgtgttccttatgatcaaatcgataacatgcaagttacgccagaagaagtggatattcttttccgtgaaggtgaaaaactcgcacctagcttgcgtcatactcgcgtattacgtgcttatgctggggtgcgaccattagttgcaagcgatgatgatccatcaggtcgtaatgtgagccgtggtattgtgctacttgaccacgcagaacgtgatggcttagatggctttattactatcactggcggtaagttaatgacttatcgtttaatggctgaatgggcgaccgaccttgtttgtaaaaaactcaataaaacggctcgttgtgttactgctgaacaggctctaccaggttcgactgaaagtcgtcaggagaccaatcaaaaagttatttcattaccaagtactattcgttattctgccgtatatcgtcacggttcacgggctactcgtttgcttgaaaaagaacgtttagatcgttcaatggtttgcgaatgtgaagcggtaacagcgggggaagttcgttacgctattgatgaactggatgtaaataatctcgtcgatttacgtcgtcgctcccgagttggaatgggaacttgtcaagctgaactctgtgcttgtcgtgcagcaggattaatgaatcgttttgaagtggcaacaccacgtcaatcaactactcaactttccgcctttatggaagaacgctggcgtggtattgaaccgattgcttggggggaagctatccgcgaagccgaatttacctcttggatgtatgctagtgtattaggtttaaatgatgtgaaaccgcttgatgaacaagcacaacaagggacggatagcaatgaattttga

SEQ ID NO: 1432 - protein, 577 aa, Haemophilus influenzae
  VARIANT 2, 3: Xaa is any amino acid
MXXFFLNFGIGGKQWDYRLVSIKDVGDLSSLSTDVIIIGGGATGAGIARDCALRGIDCILLERRDIATGATGRNHGLLHSGARYAVNDQESAEECIKENRILRKIARHCVDETEGLFITLPEDSLDYQKTFLESCAKSGIDAQAIDPELAKIMEPSVNPDLVGAVVVPDGSIDPFRLTASNMMDATENGAKMFTYCEVKNLIREGGKVIGVNVYDHKNRRERQFFAPLVVNAGGIWGQGIAEYADLKIKMFPAKGALLVMGHRINKLVINRCRKPADADILVPGDTICVIGTTSSRVPYDQIDNMQVTPEEVDILFREGEKLAPSLRHTRVLRAYAGVRPLVASDDDPSGRNVSRGIVLLDHAERDGLDGFITITGGKLMTYRLMAEWATDLVCKKLNKTARCVTAEQALPGSTESRQETNQKVISLPSTIRYSAVYRHGSRATRLLEKERLDRSMVCECEAVTAGEVRYAIDELDVNNLVDLRRRSRVGMGTCQAELCACRAAGLMNRFEVATPRQSTTQLSAFMEERWRGIEPIAWGEAIREAEFTSWMYASVLGLNDVKPLDEQAQQGTDSNEF

SEQ ID NO: 1433 - DNA, 1443 bp, Haemophilus influenzae
atgtttggaccattcaaacccgctccgcatattgcggaacttccagcggaaaaaattgattccacgtataaacgcttacgttggcaagtgtttgctgggatcttcttcggttatgctgcatattattttgtgcgtgcaaactttgacttagcacaaccaggtttaattcaagctggcttgtactcaaaagcggaactaggtgttatcggctcagcggctggtcttgcttacggtttatcaaaattcgttatggcaggtatgtctgaccgttctaaccctcgtgtattcttaccatttggtttattgctctctggtttatgtatgaccttaatgggtttattcccatgggcaacttcaggcattgccattatgtgggtaatgatcttcttaaatggttggttccaaggtatgggttggcctccatgtggtcgtactakggtgcattggtggtctaaatctgaacgcggtaccatcgtgtcaatttggaatacggcgcataatatcggtggtatggtgcctggtgcaatggtgttattagctagtgcaattttcttcagtactcacggtattgaagcgcaggcgaaagatgtttggcaacaatcattatacttccctggtattgctgcgatgatctttgcaattcctgtgtacttcgtgatgcgtgatactccacaatcttgtggtttaccatcaatcgaaaaatggcgtaatgactacccagatgactataacgaaaaaacttacgaaaatgatttaactgcaaaagaaatcttcgtaacttatgtattaaaaaacaaattgttatggtatatcgcgattgctaacgtgttcgtctatttaatccgctacggtgtattaaaatggtctccagtttacttgagtgaagtgaaacacttcaatatcaaaggtactgcatgggcatacacaatctatgaattagcagcggttccaggtacattattatgtggttgggtatcagataaagtgtttaaaggtaaacgtggtttaactggtttcatctttatgatcttaaccactgcagcggttgttgcgtactggatgaacccagctacaccagaagcagagcttgcaaactactcagcttggtatgaaaacccatatcaattaactgatttcgtattaatgaccttaatcggtttcttaatctacggtcctgtaatgttaattggtttacatgctcttgagttagcaccgaaaaaagcagcaggtacggcagcaggtttcactggtttattcggttacttaggtggtactgtatcagcttcagcagttatcggttgggcagctcaacattacggatgggatggtggtttctacgtaatgatcggcggtggcgtattagcggtgttattactcttaatcgtaatggttgaagaaggaaaacacaaagcgaaattaggcgatacctacggtactaaataa

SEQ ID NO: 1434 - protein, 480 aa, Haemophilus influenzae
  VARIANT 146: Xaa is any amino acid
MFGPFKPAPHIAELPAEKIDSTYKRLRWQVFAGIFFGYAAYYFVRANFDLAQPGLIQAGLYSKAELGVIGSAAGLAYGLSKFVMAGMSDRSNPRVFLPFGLLLSGLCMTLMGLFPWATSGIAIMWVMIFLNGWFQGMGWPPCGRTXVHWWSKSERGTIVSIWNTAHNIGGMVPGAMVLLASAIFFSTHGIEAQAKDVWQQSLYFPGIAAMIFAIPVYFVMRDTPQSCGLPSIEKWRNDYPDDYNEKTYENDLTAKEIFVTYVLKNKLLWYIAIANVFVYLIRYGVLKWSPVYLSEVKHFNIKGTAWAYTIYELAAVPGTLLCGWVSDKVFKGKRGLTGFIFMILTTAAVVAYWMNPATPEAELANYSAWYENPYQLTDFVLMTLIGFLIYGPVMLIGLHALELAPKKAAGTAAGFTGLFGYLGGTVSASAVIGWAAQHYGWDGGFYVMIGGGVLAVLLLLIVMVEEGKHKAKLGDTYGTK

SEQ ID NO: 1435 - DNA, 1095 bp, Haemophilus influenzae
atgaaacttaaaactttagccctttctttattagcagctggcgtactagcaggttgtagcagccattcatcaaatatggcgaatacccaaatgaaatcagacaaaatcattattgctcaccgtggtgctagcggttatttaccagagcatacgttagaatctaaagcgcttgcgtttgcacaacaggctgattatttagagcaagatttagcaatgactaaggatggtcgtttagtggttattcacgatcactttttagatggcttgactgatgttgcgaaaaaattcccacatcgtcaccgtaaagatggtcgttactatgtcatcgactttaccttaaaagaaattcaaagtttagaaatgacagaaaactttgaaaccaaagatggcaaacaagcgcaagtttatcctaatcgtttcccactttggaaatcacattttagaattcatacctttgaagatgaaattgaatttatccaaggcttagaaaaatccactggcaaaaaagtagggatttatccagaaatcaaagcaccttggttccaccatcaaaatggtaaagatattgctgctgaaacgctcaaagtgttaaaaaaatatggctatgataagaaaaccgatatggtttacttacaaactttcgattttaatgaattaaaacgtatcaaaacggaattacttccacaaatgggaatggatttgaaattagttcaattaattgcttatacagattggaaagaaacacaagaaaaagacccaaagggttattgggtaaactataattacgattggatgtttaaacctggtgcaatggcagaagtggttaaatatgccgatggtgttggcccaggttggtatatgttagttaataaagaagaatccaaacctgataatattgtgtacactccgttggtaaaagaacttgcacaatataatgtggaagtgcatccttacaccgtgcgtaaagatgcactacccgcgtttttcacagacgtaaatcaaatgtatgatgtcttattgaataaatcaggggcaacaggtgtatttactgatttcccagatactggcgtggaattcttaaaaggaataaaataa

SEQ ID NO: 1436 - protein, 364 aa, Haemophilus influenzae
MKLKTLALSLLAAGVLAGCSSHSSNMANTQMKSDKIIIAHRGASGYLPEHTLESKALAFAQQADYLEQDLAMTKDGRLVVIHDHFLDGLTDVAKKFPHRHRKDGRYYVIDFTLKEIQSLEMTENFETKDGKQAQVYPNRFPLWKSHFRIHTFEDEIEFIQGLEKSTGKKVGIYPEIKAPWFHHQNGKDIAAETLKVLKKYGYDKKTDMVYLQTFDFNELKRIKTELLPQMGMDLKLVQLIAYTDWKETQEKDPKGYWVNYNYDWMFKPGAMAEVVKYADGVGPGWYMLVNKEESKPDNIVYTPLVKELAQYNVEVHPYTVRKDALPAFFTDVNQMYDVLLNKSGATGVFTDFPDTGVEFLKGIK

SEQ ID NO: 1437 - DNA, 795 bp, Haemophilus influenzae
atggataaatcattaaaagcgaactgtattggcgagtttttaggtacagccttattgattttctttggtgtgggctgcgttgcagcactaaaagtagcaggcgctagttttggcttgtgggaaatcagcattatgtgggggatgggcgttgcacttgcagtatatgcaacagctggtttatctggtgcacatctaaaccctgcagtaaccattgccctttggaaatttgcttgctttgatggcaaaaaagtaattccttacatcatttcacaaatgctcggcgcattctttgctgccgcattagtttatgccttataccgcaatgtttttatcgattatgaaacagtccacaatattgttcgtggtacacaagaaagtttaagccttgcgggtacattctccacttatcctcatccaagtttaagcattggtggcgcctttgctgtggaattcgtgattactgcaattcttatggcattaattatggcattaactgacgatggaaacggagtacctcgtggtccacttgccccattattaatcggtatcttgatagccgttattggtggtgctatgggaccattaactggttttgccatgaatccagcacgtgacttcggaccaaaattctttgcttatctcgctggctggggcgaactcgctttaactggcggacgcgaaatcccttattttatcgttccaatggttgcacctgttttaggcgcattagctggtgcatggttatacaaaaaagcaattggcggcaatttaccttgtaattgcggctgcgaataa

SEQ ID NO: 1438 - protein, 264 aa, Haemophilus influenzae
MDKSLKANCIGEFLGTALLIFFGVGCVAALKVAGASFGLWEISIMWGMGVALAVYATAGLSGAHLNPAVTIALWKFACFDGKKVIPYIISQMLGAFFAAALVYALYRNVFIDYETVHNIVRGTQESLSLAGTFSTYPHPSLSIGGAFAVEFVITAILMALIMALTDDGNGVPRGPLAPLLIGILIAVIGGAMGPLTGFAMNPARDFGPKFFAYLAGWGELALTGGREIPYFIVPMVAPVLGALAGAWLYKKAIGGNLPCNCGCE

SEQ ID NO: 1439 - DNA, 1512 bp, Haemophilus influenzae
atgacagacaaaaaatacatcattgcattagaccaaggcacaacaagctctcgcgcagtattattagatcataatgcgaatgtggttgaaattgcacaacgtgaatttacccaaatctaccctcgagctggttgggtagaacataacccaatggaaatttgggcaactcaaagctcaaccttaaacgaagtcgttgcaaaagcgggcattacatctgatgaaatcgctgctatcggtatcaccaaccaacgtgaaaccaccattgtatgggaaaaatcaaccggtacacctgtttacaacgcgatcgtttggcaatgccgccgtactgcagacattaccgataaattaaaagccgatggccatgaagaatatattcgtaataccacaggcttagtggttgacccttacttctctggtacaaaagtaaaatggattttggataacgttgaaggcgcacgagaaaaagctgaacgaggcgaattattatttggtaccgttgatacttggcttgtatggaaattgactcaaggccgagtgcacgtaaccgattataccaacgcatctcgtaccatgttatttaacatccatactaaacaatgggatgacaagatgcttgaaatcttgaatattcctcgttcaatgttacctgaagtacgtaattcttctgaaatttacggccaaaccaatatcggtggtaaaggtggtgtgcgtattcctgttgcagggattgctggtgaccaacaagctgctctttacggacatctttgcgtacatgcaggccaagccaaaaacacttacggcacaggttgctttatgttactccacacgggtaacaaagctattacatccaaaaatggactactcacaaccattgcttgtaatgcaaaaggcgaaccagaatatgccttagaaggttctgtatttatcgcgggtgcatcaatccaatggctccgtgatgaactcaaaattgttcacgatagttttgactctgaatactttgcacaaaaagtgactgatagtaatggcgtatatgttgttccagctttcacaggcttaggtgcaccatattgggatccatatgcgcgcggtgcgatttttggtctttctcgcggcgcaaaccgtaatcatattgttcgagcaaccttagaatctattgcttaccaaacccgtgatgtcttagaggctatgcaatcagattcgggtgaacgattacaatatctccgtgtagatggtggtgcgacaaacaataacttcttaatgcaattccaagctgacattttagatgtaaatgtagagcgtccagttgtgaaagaagtaacagcgctaggcgcagcttatcttgctggtttagcaacgggcttctggaaagatttagacgagcttcgcgataaagcccgtgtagaacgcacctttagcccagacagcgacaatgaaaaacgtgaacgtcgctacaaaggctggaaaaaagcagttaaacgctcattagaatgggcaaaagaagatgaagaataa

SEQ ID NO: 1440 - protein, 503 aa, Haemophilus influenzae
MTDKKYIIALDQGTTSSRAVLLDHNANVVEIAQREFTQIYPRAGWVEHNPMEIWATQSSTLNEVVAKAGITSDEIAAIGITNQRETTIVWEKSTGTPVYNAIVWQCRRTADITDKLKADGHEEYIRNTTGLVVDPYFSGTKVKWILDNVEGAREKAERGELLFGTVDTWLVWKLTQGRVHVTDYTNASRTMLFNIHTKQWDDKMLEILNIPRSMLPEVRNSSEIYGQTNIGGKGGVRIPVAGIAGDQQAALYGHLCVHAGQAKNTYGTGCFMLLHTGNKAITSKNGLLTTIACNAKGEPEYALEGSVFIAGASIQWLRDELKIVHDSFDSEYFAQKVTDSNGVYVVPAFTGLGAPYWDPYARGAIFGLSRGANRNHIVRATLESIAYQTRDVLEAMQSDSGERLQYLRVDGGATNNNFLMQFQADILDVNVERPVVKEVTALGAAYLAGLATGFWKDLDELRDKARVERTFSPDSDNEKRERRYKGWKKAVKRSLEWAKEDEE

SEQ ID NO: 1441 - DNA, 468 bp, Haemophilus influenzae
atgagcgaaaaatatgtggtaacttgggatatgtttcaaatgcatgcccgtagattatcagaacgtttacttccagcttcccaatggaaaggtattattgcggtgagtcgcggtggtttgtttccagcggctgtattggctagagaattgggtcttcgtcatattgaaaccgtttgtatcgcaagttatcacgatcataacaatcaaggtgaattacaagttcttcatgcagcccaagtgccaaatggcggtgaaggatttatcgtggtagatgatttagttgatacgggtaatactgcgcgtgcgattcgtcaaatgtacccaaatgcaaaatttgtcactgtatttgcaaaacctgcaggtgcggaattagtggatgattacgtaattgatattccacaaaatacttggattgagcaaccttgggatttaggtttaacctttgttccacctctctctagaaaataa

SEQ ID NO: 1442 - protein, 155 aa, Haemophilus influenzae; identical to SEQ ID NO: 1408

SEQ ID NO: 1443 - DNA, 138 bp, Haemophilus influenzae
ttgcgtaaagatgcacttcccgcgtttttcacagacgtaaatcaaatgtatgatacattattgaataaatcaggggtaacaggtgtatttactgatttcccagatacttgcgtggaattcttaaaaggaataaaataa

SEQ ID NO: 1444 - protein, 45 aa, Haemophilus influenzae
MRKDALPAFFTDVNQMYDTLLNKSGVTGVFTDFPDTCVEFLKGIK

SEQ ID NO: 1445 - DNA, 825 bp, Haemophilus influenzae
atgaaaacaacgttaaaaatgaccgcacttgcggctctttctgcttttgttttagctggctgtggttcacaccaaatgaaatcagaagaacatgcaaatatgcaattacaacaacaagcggtgcttggattaaactggatgcaagattctggcgaatataaagcattagcttatcaagcgtacaatgcggcaaaagttgcatttgatcacgcaaaagtggcaaaaggtaagaaaaaagcggttgtggctgatttagatgaaactatgttagacaacagcccttatgctggctggcaagttcaaaataacaaaccattcgatggtaaagattggactcgttgggtagacgcacgtcaatctcgtgccgttccgggtgcggtagaatttaataattatgtaaacagccacaaaggtaaagtgttctacgtaacaaaccgcaaagacagcactgaaaaagcaggcactatcgatgatatgaaacgcttaggtttcaatggcgtggaagaatctgcattttatttgaaaaaagacaaatcagctaaagcggctcgttttgcagaaattgaaaaacaaggctatgaaatcgtactttatgtaggtgataacttagatgacttcggtaataccgtatatggcaaattaaacgctgaccgccgtgcattcgttgatcaaaaccaaggcaaatttggtaaaactttcatcatgttacctaacgcaaactacggtggctgggaaggcggtttagctgaagggtatttcaaaaaagatacacaaggccaaatcaaagctcgtttagatgcagtacaagcttgggatggtaaataa

SEQ ID NO: 1446 - protein, 274 aa, Haemophilus influenzae
MKTTLKMTALAALSAFVLAGCGSHQMKSEEHANMQLQQQAVLGLNWMQDSGEYKALAYQAYNAAKVAFDHAKVAKGKKKAVVADLDETMLDNSPYAGWQVQNNKPFDGKDWTRWVDARQSRAVPGAVEFNNYVNSHKGKVFYVTNRKDSTEKAGTIDDMKRLGFNGVEESAFYLKKDKSAKAARFAEIEKQGYEIVLYVGDNLDDFGNTVYGKLNADRRAFVDQNQGKFGKTFIMLPNANYGGWEGGLAEGYFKKDTQGQIKARLDAVQAWDGK

SEQ ID NO: 1447 - DNA, 723 bp, Haemophilus influenzae
atgatgttgcaagcctttcaaaatagaaatcataagttaatgaagaaaaatttttcgacaggaaaattgccgtctaaaggaaaaagtgcggttaattttcaccgcacttttaagccaaaattaaaacccaaaacgttgtcgttggatgaaaccaaagttgtgttattcaataaaccttttgatgtgctcacgcaatttaccgacgaacaaggacgcgctaccttaaaagattttatttcaattccaaatgtttatgcggcaggtcgattagatagagacagtgaaggattactgattttaaccaatcatggcgaattacaacatcgtttggcagatcccaaatttaaaacagaaaaaacctattgggtgcaagtggaaggtatccctgaagaaaccgatttagcacaactcagaaaaggtgtagaacttaaagatggcgtgactaaacccgctaaagtgcggttaatttcagagccaaatttatgggaacgcaatccacctatccgagaacggaaaaatattcccacaagctggttagaaattaagattagtgaagggcgcaaccgccaagtgcggagaatgactgcgcatattggtttccccactttacgattagtgagagtgagtatgggcttattatctattaatggattagaaaatggctcatttagattattatcattggatgaaataaaagcgttatttcagaccgtcaaattataa

SEQ ID NO: 1448 - protein, 240 aa, Haemophilus influenzae
MMLQAFQNRNHKLMKKNFSTGKLPSKGKSAVNFHRTFKPKLKPKTLSLDETKVVLFNKPFDVLTQFTDEQGRATLKDFISIPNVYAAGRLDRDSEGLLILTNHGELQHRLADPKFKTEKTYWVQVEGIPEETDLAQLRKGVELKDGVTKPAKVRLISEPNLWERNPPIRERKNIPTSWLEIKISEGRNRQVRRMTAHIGFPTLRLVRVSMGLLSINGLENGSFRLLSLDEIKALFQTVKL

SEQ ID NO: 1449 - DNA, 978 bp, Haemophilus influenzae
atgaacgactctattttagaacccaaacatcgtggcaatgtacgtgaaattgctgcaattgatcttggctcaaacagctttcatatgattgttgcgcgtattgtaaacggctcaatccaagtgctttctcgcttaaaacaaaaagtaaaactcgcagaaggcttagatgaaaatgcggtgcttaatcaagaggccatcacacgtggcgtgaattgcttagccttatttgccgaacgtttacaaggttttcctatggaaaacgtcaatgtagttggcacttatacgttacgaagagcggtgaataatgacgaatttttacgtcaagcagccaaagttttcccctatcccattaatattattagtgggcaaactgaagcgaaaaccatctacgctggcgtatgccatactcagccagaaaaaggcagaaagcttgttatagatattggtggtggttcgacagaaatgattatcggcgatgatttcacgccgcttatagctgaaagccgacatatgggatgcgtgagttttgcgactcaattttttaccgatggtattatttccccagaaaactttcaacgcgcgcgccaaagtgcggtcaataaaatcgaagatttaggctttgaatatcgcaaattaggttggcaatctgtgctcggctcatcggggacgattaaaactgttgcgcaagtcattgcgactaatctcgatccaaatggaaccattactgccgagcgattaaatgctctaattgaacaaacactacaagccaagcattttaccgagctaaatattaacggtttaaaccaagaccgcgtggatgtttttgtacccggtttagcgattttaagtgcagtgtttgacgtttttcatattcaacaaatgcgctattctgacggtgcattgcgcgaaggcgtcatttatagcctagaaaaaacttccaagttgcagatattcgagcgagcaccgcttgaaggttaa

SEQ ID NO: 1450 - protein, 325 aa, Haemophilus influenzae
MNDSILEPKHRGNVREIAAIDLGSNSFHMIVARIVNGSIQVLSRLKQKVKLAEGLDENAVLNQEAITRGVNCLALFAERLQGFPMENVNVVGTYTLRRAVNNDEFLRQAAKVFPYPINIISGQTEAKTIYAGVCHTQPEKGRKLVIDIGGGSTEMIIGDDFTPLIAESRHMGCVSFATQFFTDGIISPENFQRARQSAVNKIEDLGFEYRKLGWQSVLGSSGTIKTVAQVIATNLDPNGTITAERLNALIEQTLQAKHFTELNINGLNQDRVDVFVPGLAILSAVFDVFHIQQMRYSDGALREGVIYSLEKTSKLQIFERAPLEG

SEQ ID NO: 1451 - DNA, 3897 bp, Haemophilus influenzae
atgacagaacaaatacaaccatcagaaacttcgccaaaagcaccagagcaaccaagtaaaatacattgggtacgcaaggctgtttgtatcggaagtgcggtcatttttatacctgttttaggtgttgctggagtgctttctttcgatgcggggcaaaaaagtttaattcaacttgccgataaaatgcttgatagtttttccgttgagcaaattgaaggcggattacaaaatggcttggtgctaaataatattcgataccaaaccgcagggattgagacacatattgcacaagcacgtttacagcttgatttcagttgtttgctttcacgtgaagtttgtttacgagacttcactttaaataaaccgacgattgcgattaatactgcattattgcctccatcggcacctgataattcaaagtctggctcaatgaagcgtatttccttgccaattagtatcaatgcagaaaatttggtggtgcaagatttatctgtaaacattgatcagactaatattacgcttggaaattttaaaagtgcggtaagtttaaataatgaaaaaggcttaactcttgcgccgactgaaattaacgatatttcagtgattgcaaaaaaattgtctgaagttaaatcagagccgaaagccgaacagccgaataagcctgtagattgggctgcgattgagcaatctttaacacctgcttttttaggcaatgtatcagacataattcttccttttgatttacatattcctgaaatttcaggcaaaaactggcagtatcaagcagtgaatgaaaaaggcgaaacgcttcaatctgttgaaatgtctagtttaattgcacaggcggataccgtcgataaccaactgcaattacaaaaattagcggtagaaagctcgttgggtaatctttcttcacaaggtaaattacaacttgatggcgatatgccactagatttaactttaaaatcccatttggaaccgttgaaatccgctggaaaagaaattctacctgcgagtgatgtggatcttgcactttcgggatcattgaaaaaatccaccgcactttctttaaaaacaaaaggcgtattagatgctgaactgaatggcgacgtgcaattagcacaagacaaaatgcccttaaacctcacattaaacgtggcaaaaggacaatacacttttgtaaacacaatggcaccactcaaaattaatgatgtgacacttaaactcacaggggatttactgaattatcacgccgaatttaagggcgatgtagtaggaatgaattatattcccgcatctcaagtggaacttaatgccgacggcaaactttatgaagtcaccgtcaataaattggggatagattcattagacggtaaaagtgaatttgtggggactgcaaactggaaagagggtgcaaactgggatattcaagccgatttagaaaaaatgaatattggtttttttgttcctgtaatgcctgcaacactatctggtaaattgcattcacgtggttttgcaggctctcaaggatggcaagtggaagtgccagtagccgatttaaacggaatgctttctgcaaaacctatcagtttaaaaggttctgcaacgctcaatcaaaaggtacttctaacagtacctgatttgcaggttagatatggcgaaaattatcttaaagccagtggcgtattagatgatcattctgattttacgctagatataaatgcgccaaatttacgtggattatggtcagatttaaaagggcgagtaaaaggtcgagtagcgatttctggtcaaattacgacacctaatcttgatcttgatttaacttcatctaatttacatttacagggttttcagttagctaaagcaagtataaaaggtcatataaacaatacctcactctcaagtggaaaattgaatattaaagcagaacaacttcattatggcgaaaatattaaactccatttacttgatcttgatttatcaggcgatgaacaaaatcacaaactaatcctaaaatctcaaggcgagcctgttgctgcaaatttacaaattaacggacattttgaccgcactttggaacagtggaaaggcacaatttcacaggtaaaatttgaaactccgattggcgatgtaaaatccaaccaagcgattgctgtgtcctacgataacaaacaaacacaagccaatattgcctcacattgctggcaaaacaccgatgtagaattatgtttcccacaagcattcaatgcaggcaagcaaggcaatattcctttccaatttaaacgtgttaatttggatttagtgaataaacttatcgaacaaaacagcctcaaaggcaatttacaagtgcaaggaaatgtggcttggtttacggataaaccattccaatttaccgccaacgtagatggcaatcatttagccttctctcaaaaattggattaccgtacatttaaattggatattccaaaattaacacttaacgccgacattcaaaataataatttggttttaaaaacagacatcaatgtgcataaccaaggcagaattgtaggcgatattcatttaaacgatcttgcgaaaaatcgccaacttggcggtagccttgcgatagaacgattaagtttgggtattgcgaatcaactactcactcaaggcgaatccgtgaatggagaagtggtatcaaaattgcgtttcggtgggaatttagagaaaccattattaaatggtgacttcaatattcgtaatattcgtaccaaattaaaatctatgccagtgaatattactgatggcgatattgccctgcgctttaatggtaaccgttcaacattgcaagggaaaatcaaaacagtagatagccacttaaacttaactggacgtgcaaactgggctaatattgaacattggacaacagaattaaatgcgcaagcaaataatttcaacgtggatattccttctatggcgaagctacgtttcagtccaaatatcacgataaaagccaatccgaaggaattgaatttaagcggaacagtggatattccttgggcgcgtattaaaattgacagtctgccagatactgctgagccagtgagcgaagatgaagttattttaaatggcccgcacaagagcaaagaagaactgattaaacgtgaatttgccgcaaaaacaaaatcaggaatggaaattcgctctgatttacgcatcaatattggtaaagacgttagccttgatgcctatggcttgaaaaccaatcttgatggtttactttctgtgaaacaagataaaggcaatttaggtttattcggtcaaatcaatttaaccaaaggtcgctatgcttctttcgggcaagatttactcattcgtaaagggcttattagcttttctgggcaagcaacacaacctacattgaatattgaggctattcgtaatcctgaaacaatggaagacagcaaaattactgctggcgtgagagtgattggcatagctgatagcccagaagtcactattttcagtgaaccaagcaaatcacaagatcaagcactttcttatttattaacaggtcgttcgttagaaagcagcggagaagtgggttcaacgggatcagttggcgcagcattgattggtgtaggcatttcaaagagcggtaaattagtgggcagtattggcgaagtttttggtattcaagacttaaaccttggtacatctggcgtgggcgataaatccaaagtgacggtaagtggcaatattaccaatcgcttacaaataaaatatggcgtaggtttatttgatggcttagcagaagttacattacgttatcgcctaatgccacagctttattttcaatccgtttctagcacaaaccaagtgtttgatttgctttataaatttgaattttag

SEQ ID NO: 1452 - protein, 1298 aa, Haemophilus influenzae
MTEQIQPSETSPKAPEQPSKIHWVRKAVCIGSAVIFIPVLGVAGVLSFDAGQKSLIQLADKMLDSFSVEQIEGGLQNGLVLNNIRYQTAGIETHIAQARLQLDFSCLLSREVCLRDFTLNKPTIAINTALLPPSAPDNSKSGSMKRISLPISINAENLVVQDLSVNIDQTNITLGNFKSAVSLNNEKGLTLAPTEINDISVIAKKLSEVKSEPKAEQPNKPVDWAAIEQSLTPAFLGNVSDIILPFDLHIPEISGKNWQYQAVNEKGETLQSVEMSSLIAQADTVDNQLQLQKLAVESSLGNLSSQGKLQLDGDMPLDLTLKSHLEPLKSAGKEILPASDVDLALSGSLKKSTALSLKTKGVLDAELNGDVQLAQDKMPLNLTLNVAKGQYTFVNTMAPLKINDVTLKLTGDLLNYHAEFKGDVVGMNYIPASQVELNADGKLYEVTVNKLGIDSLDGKSEFVGTANWKEGANWDIQADLEKMNIGFFVPVMPATLSGKLHSRGFAGSQGWQVEVPVADLNGMLSAKPISLKGSATLNQKVLLTVPDLQVRYGENYLKASGVLDDHSDFTLDINAPNLRGLWSDLKGRVKGRVAISGQITTPNLDLDLTSSNLHLQGFQLAKASIKGHINNTSLSSGKLNIKAEQLHYGENIKLHLLDLDLSGDEQNHKLILKSQGEPVAANLQINGHFDRTLEQWKGTISQVKFETPIGDVKSNQAIAVSYDNKQTQANIASHCWQNTDVELCFPQAFNAGKQGNIPFQFKRVNLDLVNKLIEQNSLKGNLQVQGNVAWFTDKPFQFTANVDGNHLAFSQKLDYRTFKLDIPKLTLNADIQNNNLVLKTDINVHNQGRIVGDIHLNDLAKNRQLGGSLAIERLSLGIANQLLTQGESVNGEVVSKLRFGGNLEKPLLNGDFNIRNIRTKLKSMPVNITDGDIALRFNGNRSTLQGKIKTVDSHLNLTGRANWANIEHWTTELNAQANNFNVDIPSMAKLRFSPNITIKANPKELNLSGTVDIPWARIKIDSLPDTAEPVSEDEVILNGPHKSKEELIKREFAAKTKSGMEIRSDLRINIGKDVSLDAYGLKTNLDGLLSVKQDKGNLGLFGQINLTKGRYASFGQDLLIRKGLISFSGQATQPTLNIEAIRNPETMEDSKITAGVRVIGIADSPEVTIFSEPSKSQDQALSYLLTGRSLESSGEVGSTGSVGAALIGVGISKSGKLVGSIGEVFGIQDLNLGTSGVGDKSKVTVSGNITNRLQIKYGVGLFDGLAEVTLRYRLMPQLYFQSVSSTNQVFDLLYKFEF

SEQ ID NO: 1453 - DNA, 1737 bp, Haemophilus influenzae
atgaagaaaaaatcgctaaaactcaccgcactttttttagcattaagttgctttcccgcatttgctgaacaaaccgttgatattgaagttcaaggcattcgtggtttccgtgctgtgcgtaatacagatctcaatgttaatttgattaataaagaagaaatggatggctccgaacgctatcaacatttggtaaccaaagccgtggatcgtggtttgcgtgtgtttggttattatgaatcttccgtgcgttttgaacgaaaacagcgtcaaggcaaacgcgatttattgattgctcatgttacaccaggcgagccaacaaaaattgcggggactgatgtgcaaattgagggggaagccgcacaagatgaaaattttaatgcattgcgtaaaaacttaccgaaagatggcgttttggttgagcaccaaacttacgatgattacaaaacagcgatttcacgcttggcattaaatcgtgggtattttgatgggaactttaaaatttcacgtttagaaatcagccctgaaacccatcaagcatggtggcgaatgttatttgatagtggcgttcgttatcattatggcaatattacttttagccattcacaaattcgggatgattacttaaataatattcttaacatcaaatctggtgatccatatttaatgaataatttatcggatttaaccagccatttttcatcttcaaattggtttagttcagtattagttcaacctaatatcaatcataaaagtaaaacggtagatatagaaatcattctttatccacgtaaaaaaaatgcgatggaactgggtgtgggctttgctactgatggcggtgtacacggacaaataggctggacaaaaccttggattaatagccgtggacatagtttgcgttcaaatctttatctctctgcaccaaaacaaactctagaggcaacttatcgaatgccactgcttaaaaatccattaaattattactatgattttgccgtcggttgggaaggtgaaaaagagaatgataccaatacgagagtgcttacgttgtcagcgttacgttattggaataatgcgcgtggttggcaatattttggcggacttcgtacgcgatacgacagttttacacaagcggatatcactgataaaaccttacttctttatccaactgttggatttactcgtactcgattacgtggtggttcctttgccacttggggcgatgtgcaaaaaattacttttgatttaagcaaacgaatttggctatcagaatcttcttttataaaagtgcaagcatctagcgcgtgggttcgtacttatgcagaaaatcatcgtatcgttgctcgtgctgaaatcgggtatttacatacaaaagatattgaaaaaattccgcctacactgcgtttctttgctggtggcgatcgtagtgtgcgcggttacggctataaaaaaattgcgcctaaaaataaaaacggaaaattagttggcggttcgcgattgcttaccgcttctttagaatatcaatatcaagtctatccgaattggtgggcggcaacttttgcagatagtggattagctgccgataattacacagcaaaagaattgcgttatggcgcaggcgttggtgtgcgttgggcatcgccagttggtgcgattaaatttgatattgccacacccattcgtgataaagataacagcaaaaatattcaattttacattggacttggtacagaaatttaa

SEQ ID NO: 1454 - protein, 578 aa, Haemophilus influenzae
MKKKSLKLTALFLALSCFPAFAEQTVDIEVQGIRGFRAVRNTDLNVNLINKEEMDGSERYQHLVTKAVDRGLRVFGYYESSVRFERKQRQGKRDLLIAHVTPGEPTKIAGTDVQIEGEAAQDENFNALRKNLPKDGVLVEHQTYDDYKTAISRLALNRGYFDGNFKISRLEISPETHQAWWRMLFDSGVRYHYGNITFSHSQIRDDYLNNILNIKSGDPYLMNNLSDLTSHFSSSNWFSSVLVQPNINHKSKTVDIEIILYPRKKNAMELGVGFATDGGVHGQIGWTKPWINSRGHSLRSNLYLSAPKQTLEATYRMPLLKNPLNYYYDFAVGWEGEKENDTNTRVLTLSALRYWNNARGWQYFGGLRTRYDSFTQADITDKTLLLYPTVGFTRTRLRGGSFATWGDVQKITFDLSKRIWLSESSFIKVQASSAWVRTYAENHRIVARAEIGYLHTKDIEKIPPTLRFFAGGDRSVRGYGYKKIAPKNKNGKLVGGSRLLTASLEYQYQVYPNWWAATFADSGLAADNYTAKELRYGAGVGVRWASPVGAIKFDIATPIRDKDNSKNIQFYIGLGTEI

SEQ ID NO: 1455 - DNA, 573 bp, Haemophilus influenzae
atgaaagtagaaaaaaatgtagtggtgagcatttcttaccaagttcgcacacaagatggcgtattggtagatgaagctccagcaaatcaaccactagaatatttacaaggtcacaataatttagtagtcggtcttgaaaaagcacttgaaggtaaagaagttggcgacaaatttgaagtacgtgtacaacctgaagaaggttatggtgcgtacagcgaaaatatggttcaacgtgtaccaaaagatgtattccaaggtgttgatgaacttgaagtcggtatgcgtttcttagcggatactgacattggcccagttccagtggtgattactgaaatcgatggcgatgaagttgtagttgatggaaaccatatgttagcgggtcaagaattacatttcaccgttgaggttgttgcagcgcgtgaagcaacgttagaagaaattgctcacggccacgttcacggtgcgcacagccacgatgatgacgaagaaggtcacggttgtggctgtggtggtcatcatcacgaacataatcacgaacataatcacggcagctgtggttgcggcggtcactaa

SEQ ID NO: 1456 - protein, 190 aa, Haemophilus influenzae
MKVEKNVVVSISYQVRTQDGVLVDEAPANQPLEYLQGHNNLVVGLEKALEGKEVGDKFEVRVQPEEGYGAYSENMVQRVPKDVFQGVDELEVGMRFLADTDIGPVPVVITEIDGDEVVVDGNHMLAGQELHFTVEVVAAREATLEEIAHGHVHGAHSHDDDEEGHGCGCGGHHHEHNHEHNHGSCGCGGH

SEQ ID NO: 1457 - DNA, 423 bp, Haemophilus influenzae
atgtcaaaattggctgaattacaagcagaaacccgtgaaattatcgaagatttacttaatgatggcagtgatccaaatgcgctttacattattgagcatcacatcgcacaccacgattttgatttgttagaaaaaatcgcggttgatgcgtttaaagcgggctatgaagtttccgaagcggaagaatttaaagatgatgacggtaaaccaattttctgttttgacatcatcagtgaagtagaattaaaagctgaaattatcgatgcacaacaaaaagaaatccttccattgttagaaaaacataaaggcatttatgatggttggggcacctattttgaagacccaaatgccgatgaagatgaatacggcgatgatggggaattttttgatgatgaagatgaagaagagcctcgtgtccattaa

SEQ ID NO: 1458 - protein, 140 aa, Haemophilus influenzae
MSKLAELQAETREIIEDLLNDGSDPNALYIIEHHIAHHDFDLLEKIAVDAFKAGYEVSEAEEFKDDDGKPIFCFDIISEVELKAEIIDAQQKEILPLLEKHKGIYDGWGTYFEDPNADEDEYGDDGEFFDDEDEEEPRVH

SEQ ID NO: 1459 - DNA, 1020 bp, Haemophilus influenzae
atgctcgaacaactcccttatttggcattaaaaactccgccaaaaaccaccgcacttttaaaggctgaatgcgcggattttattgtaaaagagcatttaggctatgaaatgtcgggcgatggagagtttgttgcattgtatgtacgcaaaacagattgcaacaccttatttgttggcgaaaaattagctaaatttgctggtgtttctgaacgcaatatgggatatgcagggttgaaagatcgtcgagcggtgacagaacaatggttttgcttgcaaatgccaggaatggaaacgcccgatttcagtcaatttgaattagatggcgtagagattttaacggttactcgacataaccgaaaaattcgcacgggtagccttgaaggaaattatttcgatattttattacgcggtgcagaagaatctgatgagcttaaagcgcggttggattttgtggcaaattttggtttcccaaattattttacggaacaacgttttggtcgggatggccgtaacctcacgcaagcattgcgttgggctcaaggggaaatcaaggtaaaagatcgcaaaaaacgcagtttttatctttccgccgcacgtagtgaaatttttaatttagttgtggcagcacgtattgcaaagggcacaacaaatcaagttttaccaaatgatattgtgcaattagcaggttcgcacagttggttcaaagcggatgaaaaagaagacttaactgccttgcaagtgcggttagaaaatcaagatattttactctctgctcctttaattggcgaagatattttagcagcaagcgatattgaaaatgaaatcgtaaatcaacattcagctttcgattctttaatgaaacaagaaagaatgaaagcagtgcgtcgcccattgttaatgaaagcaaaagggttttcttgggcatttgagccagaaggcttgcgtttaaaattttatttgccagcaggcagttatgccacggcattagttcgtgagttagtaaattacacagaagaataa

SEQ ID NO: 1460 - protein, 339 aa, Haemophilus influenzae
MLEQLPYLALKTPPKTTALLKAECADFIVKEHLGYEMSGDGEFVALYVRKTDCNTLFVGEKLAKFAGVSERNMGYAGLKDRRAVTEQWFCLQMPGMETPDFSQFELDGVEILTVTRHNRKIRTGSLEGNYFDILLRGAEESDELKARLDFVANFGFPNYFTEQRFGRDGRNLTQALRWAQGEIKVKDRKKRSFYLSAARSEIFNLVVAARIAKGTTNQVLPNDIVQLAGSHSWFKADEKEDLTALQVRLENQDILLSAPLIGEDILAASDIENEIVNQHSAFDSLMKQERMKAVRRPLLMKAKGFSWAFEPEGLRLKFYLPAGSYATALVRELVNYTEE

SEQ ID NO: 1461 - DNA, 750 bp, Haemophilus influenzae
atgcgaattttagttagtaatgatgatggttttcacgcggaaggcattcaagttttagcaacggaattaagaaaaattgcagaagtcattattgttgcacccgatcgtaatcgaagtgcagcatcaagctcgctcacattggttgagccattacgcccacgccatttagataatggcgattattgtgtaaatggtacaccagcagattgtgtacatttagcgttaaacggatttttatctggccaagtagatttagtggtatcaggtattaatgcgggttgtaatatgggcgatgatacgatttattcaggcacattagctgcagcccttgaaggtcgtcatttaggtttgcctgctattgcagtttcgttagatggtcgtcagcattatgaaacagcagcacgagtggtatgtgatctcattcctaaattacatcatcaattattaaaccctcgtgaagtgattaacatcaatgtaccagacttaccttttgaagaattaaaaggttacaaggtgtgtcgcttaggttatcgttcatcttccgttgaagtcattaaacaaaaagatcctcgtgatgaaaccatttattggattggcccttcagcattacctgaagatgaaagcgaaggaacagatttttatgccgtgaagaatggttatgtgtctatcacaccaattcaagcggatcttaccgcatatcattcattgctttctttgcaaaattggttagatcaggaatttaccaaatag

SEQ ID NO: 1462 - protein, 249 aa, Haemophilus influenzae
MRILVSNDDGFHAEGIQVLATELRKIAEVIIVAPDRNRSAASSSLTLVEPLRPRHLDNGDYCVNGTPADCVHLALNGFLSGQVDLVVSGINAGCNMGDDTIYSGTLAAALEGRHLGLPAIAVSLDGRQHYETAARVVCDLIPKLHHQLLNPREVININVPDLPFEELKGYKVCRLGYRSSSVEVIKQKDPRDETIYWIGPSALPEDESEGTDFYAVKNGYVSITPIQADLTAYHSLLSLQNWLDQEFTK

SEQ ID NO: 1463 - DNA, 579 bp, Haemophilus influenzae
atgaaaattttcggcacgatgtacgataaaacgatggaatggtcaaaacatcgttttgctgttttttggctctcttttgtaagttttatcgaggcgatattttttcctattccgcccgatgtgatgttgatcccaatgtctatgtcaaagccaaaaggcgcggtgaaatttgcattttatacggcaattgcgtctgtaatcggcggaattatcggttatgctattggtttttatgcaacggactgggtggaaaacattgtgcaacaatggggatatgctgcgcattgggcaaaagccgtcagttggtttgagcaatggggcgtattagttgtgtttgtggcgggttttagcccaattccttacaaggtgtttacgctctgctctggcgtgatgcaaatggcatttttcccttttgttatcaccgcatttgtttcacgtttagcgcgtttcttgctagtagcaaaattagctgcatggggcggtgaaaaattcgcagcaaaattgcgaaaatctattgagattattggctggtcagtggttgtactggctgtaatcgcttattttatactgaaaacttag

SEQ ID NO: 1464 - protein, 192 aa, Haemophilus influenzae
MKIFGTMYDKTMEWSKHRFAVFWLSFVSFIEAIFFPIPPDVMLIPMSMSKPKGAVKFAFYTAIASVIGGIIGYAIGFYATDWVENIVQQWGYAAHWAKAVSWFEQWGVLVVFVAGFSPIPYKVFTLCSGVMQMAFFPFVITAFVSRLARFLLVAKLAAWGGEKFAAKLRKSIEIIGWSVVVLAVIAYFILKT

SEQ ID NO: 1465 - DNA, 186 bp, Haemophilus influenzae
atgaacaaattaagtcttgttttagtagctggatttcttttggttggatgtgcatctgaaccagttaaagatccagattcattaccaaatggcattatgcaaccagtagaaggcactggtgccgttactggtggtagttttatgccagaaattcaaaaaaatacgataccaacacaaatgaaataa

SEQ ID NO: 1466 - protein, 61 aa, Haemophilus influenzae
MNKLSLVLVAGFLLVGCASEPVKDPDSLPNGIMQPVEGTGAVTGGSFMPEIQKNTIPTQMK

SEQ ID NO: 1467 - DNA, 1218 bp, Haemophilus influenzae
atgaaaaaatcatttctcttactccctttgagtcttgttgtattatcggcttgtacctctaattttcctgcacctatttctgatgcagatggaaatctttcccctagtgtaatacaatctgtaaatggcagtaatgtaggtggtgcttggcaacctgaaattcaaaaaaattcattacctacaacgggaaatatagtcacgccacaaccaaattttcaaccgattaatcaacaaccaacaatgccaacagcacctgcacaacctgcatttcaaccctctccgaaaaccgtagttagtgcaccgacagtacaaacaaaaacagttaccaaaacagtcgctgattgtgtagatggacagcatattaatatcccacgtaatccaaataccaatgtgccagattacagcaaaatctcaaaaggctcttacaaaggcaatacctataaagtaaacaaaggcgatacaatgttcttaatcgcttacttggcggggattgatgtaaaagaattggcggcgttgaataacctatccgaaccttataatttaagtttagggcaagttttaaagatttctaattgtagcacaaaaacggttactacaacggtttctgtaaaacaacctgcagtcacagcatcaacagcaacgccagttaaaccagcagtcacttatactccgggtgcaaacggtactcaaataggatctgacggtactattattggccccattaaatcagaggctggcacatcgcctagtgtacctgtggcaacttcatcaacacaggttacgtcatctgtaaataatgcgaatagcacaccaattaattccaatgtcgttgcgccaatcgcctcaaatgttgtgtggcaatggccgacttcaggtaatattattcaaggtttctcaagcacagatggcggtaacaaaggaattgatattagtggttcacgaggacaagctgtaaaagcggctgcagcagggcgaatagtgtatgcaggcaatgctttacgtggttacggtaatttaattatcatcaaacataatgatgattttttaagtgcctatgcgcataacgacaaaattcttgtcgccgatcaacaagaagtcaaagcaggtcaagacatcgcaaaaatgggaagttctggtacaaataccgtgaaactccactttgaaattcgctataaaggtaaatcagtggatccagtacgttacctaccaagacattaa

SEQ ID NO: 1468 - protein, 405 aa, Haemophilus influenzae
MKKSFLLLPLSLVVLSACTSNFPAPISDADGNLSPSVIQSVNGSNVGGAWQPEIQKNSLPTTGNIVTPQPNFQPINQQPTMPTAPAQPAFQPSPKTVVSAPTVQTKTVTKTVADCVDGQHINIPRNPNTNVPDYSKISKGSYKGNTYKVNKGDTMFLIAYLAGIDVKELAALNNLSEPYNLSLGQVLKISNCSTKTVTTTVSVKQPAVTASTATPVKPAVTYTPGANGTQIGSDGTIIGPIKSEAGTSPSVPVATSSTQVTSSVNNANSTPINSNVVAPIASNVVWQWPTSGNIIQGFSSTDGGNKGIDISGSRGQAVKAAAAGRIVYAGNALRGYGNLIIIKHNDDFLSAYAHNDKILVADQQEVKAGQDIAKMGSSGTNTVKLHFEIRYKGKSVDPVRYLPRH

SEQ ID NO: 1469 - DNA, 1419 bp, Haemophilus influenzae
atggaaaattttaaacatttacctgaacctttccgcattcgtgttattgaaccagtaaaaagaactactcgtgagtatcgtgagcaagcgatcttaaaatcaggcatgaatccatttttattggatagtgaagatattttcattgacttacttacagatagcggtactggtgccgttacacaagatatgcaagctgcaatgttacgtggcgatgaagcctatagtggcagtcgcagttattatgcgttagctaaagcagtgaaagatatttttggttatgaatatacaattcctactcatcaaggccgcggtgctgaacaaatttatattccagtattgattgctaaacgtgaacgtgagaaaggtttagatcgcagcaaaatggtggttttctctaactatttctttgataccacacaaggacatagccaaattaatggggcaacggttcgcaatgtttatatcaaagaggcatttgatacaacagcaaaacatccatttaagggtaatttcgatttagaaaaattagaaaaaggcattcaagaggcgggagcacataatgtaccttacattgtatgtaccattacttgtaactctgcgggtggtcagccagtttctattgcaaacttaaaaggcatgtatgaaattgcgcgtaaatacgatattccagtcatcatggattcagctcgttttgcagaaaacgcctattttgttcaacaacgtgaagaagcttataaagactggactattgaacaaattacttacgaaagctatcgctatgctgacggtttagcgatgtccgccaaaaaagatgctatggtgccaatgggggggattttagcgtttaaagataaatcaatggaggaagtctatcacgaatgtagaacgctttgtgttgtgcaagaagggttccctacttatggtggtttagaaggtggtgcaatggaacgcttggctgttggcttacatgatggtatgcgtcaagaatggctggcttatcgtattgcgcaaattgaatatttggttgcaggcttagaaaaaattggtgtgctttgccaacaaccaggtggccacgctgcgttcgtagatgcgggtaaattattaccacatattccagccgaccaattcccagcacaagcactttcttgcgaactttataaagttgcaggtataagagcggtagaaattggctcatttttattagggcgagatccgaagacgggtaaacaactaccatgtccagcagagcttttacgcttaactgtaccacgtgcaacttatacgcaaactcatatggatttcattattgaggcgttccaaaaagtgaaagaaaatgcggagaatattaagggtttaacctttacttatgaaccaaaagttctccgccactttacggcacgtttaaaagaagttgaataa

SEQ ID NO: 1470 - protein, 472 aa, Haemophilus influenzae
MENFKHLPEPFRIRVIEPVKRTTREYREQAILKSGMNPFLLDSEDIFIDLLTDSGTGAVTQDMQAAMLRGDEAYSGSRSYYALAKAVKDIFGYEYTIPTHQGRGAEQIYIPVLIAKREREKGLDRSKMVVFSNYFFDTTQGHSQINGATVRNVYIKEAFDTTAKHPFKGNFDLEKLEKGIQEAGAHNVPYIVCTITCNSAGGQPVSIANLKGMYEIARKYDIPVIMDSARFAENAYFVQQREEAYKDWTIEQITYESYRYADGLAMSAKKDAMVPMGGILAFKDKSMEEVYHECRTLCVVQEGFPTYGGLEGGAMERLAVGLHDGMRQEWLAYRIAQIEYLVAGLEKIGVLCQQPGGHAAFVDAGKLLPHIPADQFPAQALSCELYKVAGIRAVEIGSFLLGRDPKTGKQLPCPAELLRLTVPRATYTQTHMDFIIEAFQKVKENAENIKGLTFTYEPKVLRHFTARLKEVE

SEQ ID NO: 1471 - DNA, 1236 bp, Haemophilus influenzae
atgaaaaaacaaccttccatttttggtggcgcctgtattattgctagtgtttgcgtcggagctggaatgcttggtttaccaacatctggtgctggagcttggacaatatggtcagcattagcaatttgcttaacgatgataatcatgacattatcaggctggttattacttgaggcctattctacttatgatttaagagcatcatttagtaccgtaactaaagatatgctcggttcaactatcaattctattaataatcttgcggtgtattttgtcgggggtattttactttatgcttataccactgcatctggaggtatactagaaaaccttattaaaccgtggattgattttggttcatctacattggcaatttgctccactgtatttgtattagtcttttccttctttgtttggcattccactcgcattgtagacagaatatctgttttattgattgtattcatggggtttacttttatttttagtacttatggattagcaactaatattagtttagatactttattagatattggtggaaaagatacaaactatgcaaaatatgcggtagggatgtttcctgttgcattaacatcttttggttaccatcattctgtttgtactatgcgagcctattatggagacgagaaaaaagctaaatatgccatttcaggtggaacagccattgctcttactctttatttactttggattttttcaattttcggaaatttgcctcgcaatcaatttgcacctgtaatagctagtgatggcaatctagatatattacttaacgctttaggtagagtaatagaatctaacacggttaaacaaatgattaatgccttttctatcgccgcaattttgtcatcttttattggcgtaggattaggcgtattcgattatctcgctgatttcttcaaatttgataatagcaaaattggacgaacaaagtcatgggctgtgactttcctacctccactaattatgtcaattttatttccattgggtttcttaaaagccattggatatgccggcgcagtagcgacaatttggacttgcataattccagcacttcttgcttataaatctcgcaaaataaatgcagcagcaacaacattccgagtttgtggtggaaatggcttaataatctttattgtattatttggtgtttttgtggctattttccattttctagcaatgtttgactatttgcctgtctttaaaggataa

SEQ ID NO: 1472 - protein, 411 aa, Haemophilus influenzae
MKKQPSIFGGACIIASVCVGAGMLGLPTSGAGAWTIWSALAICLTMIIMTLSGWLLLEAYSTYDLRASFSTVTKDMLGSTINSINNLAVYFVGGILLYAYTTASGGILENLIKPWIDFGSSTLAICSTVFVLVFSFFVWHSTRIVDRISVLLIVFMGFTFIFSTYGLATNISLDTLLDIGGKDTNYAKYAVGMFPVALTSFGYHHSVCTMRAYYGDEKKAKYAISGGTAIALTLYLLWIFSIFGNLPRNQFAPVIASDGNLDILLNALGRVIESNTVKQMINAFSIAAILSSFIGVGLGVFDYLADFFKFDNSKIGRTKSWAVTFLPPLIMSILFPLGFLKAIGYAGAVATIWTCIIPALLAYKSRKINAAATTFRVCGGNGLIIFIVLFGVFVAIFHFLAMFDYLPVFKG

SEQ ID NO: 1473 - DNA, 2586 bp, Haemophilus influenzae
atgatttccgaagaaaatttccaacagcacacgccaatgatgcagcaatatctaaaactcaaagcggagaatccagatattttgttgttttatcgcatgggggatttttacgagttgttttatgacgatgcgaaaaaagcggcagcattgttggatatttctttaacgaaacgaggtcaatctgcaggacagcccattccgatggcaggaatgccttatcatgcggtggaaggttatttagcaaaattagtgcagttaggcgaatctgtggcgatttgtgaacagattggtgatccagccacaagcaaagggccagtggaacgtcaaattgtgcgaattgttacacctgggacagtaagcgatgaagcgcttttgcctgaacgccaagacaatctgattgctgcggtatatcaagagaaagaaaaatttggattagccactttagatatgacctctggccgttttcagctttgtgaacctgcggacaaagaaactttgcgtgcggaattacaacgtattgcacctgtggaattgctgtattgtgaagaatttaatgaaatggctgccatagaacattgtaagggattacgacgtcgcccgatttgggaatttgaacttagcacagccattacgttattaaatcgccaatttggcacaaaagatttacgcgcctttggtgtggaaaaatcccctctaggcttaagtgcggctggttgtttattgcaatatgcaaaagaaacccaacgtaccgcattaccccatattcaaagcattagtttgattcaaaatcaagactgcattcagttagatgccgccactcgcagaaatcttgaattaacacaaaatcttgcaggtggcacagaaaatacgctatcgtctgtattggataaatgcgttacgccaatgggcagtcgcttattgaaacgttggattcaccagcctgttcgtgatgtggaaaaattaaaacaacgccaacaatcgattgcggaaattctgaattttgatttagtcgatgaacttcagccttatttgcaattagtcggtgatatggagcgtattttggcacgtgttgcgctacgttcagcacgtccacgcgatctcactcgcttacgcacggcgttagaacaaattccagcattacgtacgattgtgcaacaaaaaacaccgccatttttaaccgcacttttcagccaaattgctgatttcagcgagcagtgcgatttattgcaacgtgcattgattgaaacgcctccgcttttaatccgtgatggtggcgtgattgctaaaggatacaatgcagagttagacgaatggcgtatgctctctgatggtgcaactcaatatttggaaaatctagaaaaacgtgagcgtgagagcacaggcattgatacgttaaaaatcggttttaatgcagtgcatggttattacattcaaattagccaaggccaagcacataaagcgcctattcattatgttcgccgtcaaaccttgaaaaatgcagagcgttacattattcccgaactcaaagaatatgaagacaaagtgctgaaatcaaaaggcgcagcgttagcattagaaaagcaactttacgatgaattatttgatttattattaccgcacttaggcacgttgcaactggcgagcctcgcactttctgaattggatgtattggtcaatcttgccgagcgcgcagacaccctcaattacgttatgccaacattctgtgatgaagtgagtgtgaaaattaaaaatggtcgccatcctgttgtggaacaagtattgaaagatcctttcatcgccaacccagtggaactcaatcacaaccgtcatttgttaattatcactgggccaaatatgggcggtaaaagtacttatatgcgtcaaaccgcattaattacattgctggcgtatatcggcagttttgtgccagcagacagcgcgcgaattgggccaattgatcgtatttttactcgaattggtgcgtctgatgatttagcctcggggcgttcaacctttatggtggaaatgacggaaatggcaaatattcttcatcaagctacagcgcaaagtctcgtgcttattgatgaaatcggtcgtggcacatccacttacgatggcttatccttagcttgggcttgtgcggaatggttagccaaaaaaatccgctcgcttacattatttgccacccattattttgaattaaccgcattaccggaacagctagatggtattgccaatattcatttagatgctcttgagcataacaacagcatcgcctttatgcacgctgtacaagatggcgcagcaagtaaaagttatggtttggcagtggcagctttggctggcgtgccacaatctgttattaaactggcaaaacagaaattgacacaattagaaaaaaactcaagccattcagccgatcaacaaattcaagcattgcgtgaagccaatcacaatcagggcgaattattgtttgaacaagaaacggacgcactaagagaggctattgaaaagctggatcccgatgatttaagccctaaacaagccttggcgtatttgtatcagttaaagaaaatggtggggtaa

SEQ ID NO: 1474 - protein, 861 aa, Haemophilus influenzae
MISEENFQQHTPMMQQYLKLKAENPDILLFYRMGDFYELFYDDAKKAAALLDISLTKRGQSAGQPIPMAGMPYHAVEGYLAKLVQLGESVAICEQIGDPATSKGPVERQIVRIVTPGTVSDEALLPERQDNLIAAVYQEKEKFGLATLDMTSGRFQLCEPADKETLRAELQRIAPVELLYCEEFNEMAAIEHCKGLRRRPIWEFELSTAITLLNRQFGTKDLRAFGVEKSPLGLSAAGCLLQYAKETQRTALPHIQSISLIQNQDCIQLDAATRRNLELTQNLAGGTENTLSSVLDKCVTPMGSRLLKRWIHQPVRDVEKLKQRQQSIAEILNFDLVDELQPYLQLVGDMERILARVALRSARPRDLTRLRTALEQIPALRTIVQQKTPPFLTALFSQIADFSEQCDLLQRALIETPPLLIRDGGVIAKGYNAELDEWRMLSDGATQYLENLEKRERESTGIDTLKIGFNAVHGYYIQISQGQAHKAPIHYVRRQTLKNAERYIIPELKEYEDKVLKSKGAALALEKQLYDELFDLLLPHLGTLQLASLALSELDVLVNLAERADTLNYVMPTFCDEVSVKIKNGRHPVVEQVLKDPFIANPVELNHNRHLLIITGPNMGGKSTYMRQTALITLLAYIGSFVPADSARIGPIDRIFTRIGASDDLASGRSTFMVEMTEMANILHQATAQSLVLIDEIGRGTSTYDGLSLAWACAEWLAKKIRSLTLFATHYFELTALPEQLDGIANIHLDALEHNNSIAFMHAVQDGAASKSYGLAVAALAGVPQSVIKLAKQKLTQLEKNSSHSADQQIQALREANHNQGELLFEQETDALREAIEKLDPDDLSPKQALAYLYQLKKMVG

SEQ ID NO: 1475 - DNA, 1386 bp, Haemophilus influenzae
atgaccgcactttttcaacaacttccttccgttgataaaattctcaaaacacctcaaggcttacaactcattaccgaatttggtcacactgcagtcgtggcaatatgtcgagaattattaacccaagctcgtcaatttattcaaaaaaataaccaacttcctgaatatttttctaattctgaccgcacttttgtagaaattcattctcgcctacaaaaacaaaaccaagtacaaatcaaagcggtgcataatctgactggtacggtgttgcacacaaatcttgggcgggcactttggtctgaagcagcacaacaagcagcactttctgcgatgcaaaaaaatgtgtcgcttgaatatgatttagatgaaagtaagcgtagtcatcgcgataattacatcagtgaattattatgcaaactcacaggtgcggaagccgcctgcatagtgaataacaacgctgctgcggtattgttaatgttagcgacctttgctcaaggtaaagaagtaattatttctcgtggcgaattaattgaaatcggtggtgcatttcgtatcccagatattatggaacaagctggatgctatttagtggaagtgggcaccactaatcgtactcacctgaaagattatcgtaatgctatcactgaaaatacggcttttttaatgaaagtgcatagcagcaattatcaaatttgtggttttacctcttcagtttcagaagaagagcttgcggaactaggccgagaaatgaatgtacccgtagtcactgatttaggcagcggcgcattagttgatttaagccaatatggcttaccaaaagaaccaaccgtgcaagaaaaaatcgcacaaggtgtggatttggtctctttctctggcgataaattgcttggtggcgtgcaagcaggcattatagtgggtaaaaaagcatggatcgaacaattacaagcccatccactcaagcgtgcattacgttgcgataaagttattttatcaggcttagaagccacattacgtttatatttaaaccctgaaaaattaactgaaaaattaccgactttgcgattactcactcagccattagaacaactcaaaataaatgctacgcgtctcaaagagcggttagaatctcgcttaaattcacaatttgagattcaaattgaagttagccaagcacaaatcggtagcggctcacaaccaatggaaagaatcccttccgtggctgttactattgcagaaaaaacaaacgtaaaactttccgcactttcggctcgttttaaacaactttctcaacctattattgggcgaatggaaaacggaaaaatttggctagatttacgtagtcttgcagatattgaaacattattaaatacattggatgaactatga

SEQ ID NO: 1476 - protein, 461 aa, Haemophilus influenzae
MTALFQQLPSVDKILKTPQGLQLITEFGHTAVVAICRELLTQARQFIQKNNQLPEYFSNSDRTFVEIHSRLQKQNQVQIKAVHNLTGTVLHTNLGRALWSEAAQQAALSAMQKNVSLEYDLDESKRSHRDNYISELLCKLTGAEAACIVNNNAAAVLLMLATFAQGKEVIISRGELIEIGGAFRIPDIMEQAGCYLVEVGTTNRTHLKDYRNAITENTAFLMKVHSSNYQICGFTSSVSEEELAELGREMNVPVVTDLGSGALVDLSQYGLPKEPTVQEKIAQGVDLVSFSGDKLLGGVQAGIIVGKKAWIEQLQAHPLKRALRCDKVILSGLEATLRLYLNPEKLTEKLPTLRLLTQPLEQLKINATRLKERLESRLNSQFEIQIEVSQAQIGSGSQPMERIPSVAVTIAEKTNVKLSALSARFKQLSQPIIGRMENGKIWLDLRSLADIETLLNTLDEL

SEQ ID NO: 1477 - DNA, 1860 bp, Haemophilus influenzae
atgattattgttacttcaggtcacgttgatcacggcaaaacagcattattaaaagcattaactggcaaaagtaccgcacatttaccagaagaaaaaaaacgcggaatgaccattgatttagggtatgcctatctgccgttagaaaacaaagtgcttggctttattgatgtaccgggacacgaaaaattcttgtcaaatatgcaggcaggcttaggtggtgtgcattatgcaatgttaattgtggctgccgatgaaggcgttgcaacgcaaacgaaagaacatttagcaatcttacgccagcttcaattccacgaaattattgttgtcatcacaaaagcagatcgtacaaattcagagcaaattgaatcgttaatccaagaaattaaacaaaattatagttttttacgtggtgctaattacttcgttacctcagcagaaacgggacaaggcatcagtgaattacgtcattacttagctaatctacctgaattatctgatacccagaaacctttccgttacgcaatagaccgagtattcaacgtaaaaggggcgggtaccgtcgtgacaggcacagccttttcagggacagtgaaagtaaacgatgaaatttacctttccactggacagaaagttcgtgtaaaagcgattcacgcacaaaatacatcaagcgaacaaggtattgcggggcaacgtttagcgttaaatttaaatgctgatttagaccgcacatcaatgaaacgaggtgattggttattgcagaatgagccacttccaccaacagatcgcatcagtgtacaaattttggctgaagtaccattaaatgaaagccaacctgtgcatatttatcacggcgcaagtcgcactacgggtaaactcaccttattacagggaaaaaatgccgcaaaaaatgaccgcactttggctgaaatcatattagattcgccattattcttggcttttggagacaaacttattttacgcagtggcgatacaaaaaccttaattgccggcgcacgagtattggaaattaactcgccaaaacgtcataaacgtactgaagtgcggttaaatttcctagcgaatttagcattggcagagaacgcttcgcaacgtattgcgcttacccttaaacataatgcgacaacagcacgccaattaatgtggatggaacaactgacttccttgcaattagataaagcactcgtcgagcgagacgccgtacgttatcaagattggtgttttaatactaattacatacaagaaaaaacacagcaaattttaaccgcacttaatacttatcacgagcaacataatgatcaacttggtgtaagcaaagccagattatatcgaatgactgccttaaaccagcctgaaaacttgatcaatcattttattgatgaaatgttagaagagggaagattacagcaaactcgaggttggcttcacttacccgaacataaaatccaatttagccaagaagaacaaaaatattggtcaagtgtactctatgaatttgaaaaagcccaaggtcaagccatttgggtacgtgatatggcaaatgcactcgctattgatgaatcaattatgcgtaattttatgtataaagcagggaaattgggttacctcacaccaatcgtgaaagatagatttttcttaactgaaactatctatgcttatgcaagacttattaaacaaatcgcacaagaacaaggaaaagtttccgtaaatgaagtacgtgataaattaaatttcgggcgcaaacttaccgttcaactgatggaatatttcgaccgaatgggatttttacgtcgcaaaggcaatgaccatattctacgcgataagaatgtttttgatttatga

SEQ ID NO: 1478 - protein, 619 aa, Haemophilus influenzae
MIIVTSGHVDHGKTALLKALTGKSTAHLPEEKKRGMTIDLGYAYLPLENKVLGFIDVPGHEKFLSNMQAGLGGVHYAMLIVAADEGVATQTKEHLAILRQLQFHEIIVVITKADRTNSEQIESLIQEIKQNYSFLRGANYFVTSAETGQGISELRHYLANLPELSDTQKPFRYAIDRVFNVKGAGTVVTGTAFSGTVKVNDEIYLSTGQKVRVKAIHAQNTSSEQGIAGQRLALNLNADLDRTSMKRGDWLLQNEPLPPTDRISVQILAEVPLNESQPVHIYHGASRTTGKLTLLQGKNAAKNDRTLAEIILDSPLFLAFGDKLILRSGDTKTLIAGARVLEINSPKRHKRTEVRLNFLANLALAENASQRIALTLKHNATTARQLMWMEQLTSLQLDKALVERDAVRYQDWCFNTNYIQEKTQQILTALNTYHEQHNDQLGVSKARLYRMTALNQPENLINHFIDEMLEEGRLQQTRGWLHLPEHKIQFSQEEQKYWSSVLYEFEKAQGQAIWVRDMANALAIDESIMRNFMYKAGKLGYLTPIVKDRFFLTETIYAYARLIKQIAQEQGKVSVNEVRDKLNFGRKLTVQLMEYFDRMGFLRRKGNDHILRDKNVFDL

SEQ ID NO: 1479 - DNA, 855 bp, Haemophilus influenzae
atgaaaaaaacgctcgttgctgcattaattagttctgtcatcttactcacaggctgccaagataaagatactgaagcaaaaataaaacaactaaatcaaacagtagcacaactcaatgctgaaaatgccaaattaaaacagcaaatagaaaaaacagtcccagcaatttttgtggaaaatgatgaaatatttaatcaatctgaaattattaaacatcctaaatcgaaagaagattaccagcctgaagaaaccaaaattgagtattcaatttcaacaataaaaaccaatattgattggcttaatgatctattgtggaaaaaattgactgaaaatgaagaaacgaaaaatatttctcgtgaacaatttgtagcacgttatcaaaccgcttttgaggaagacaaaaaagaggcgaaagaaacaccatcttttggaatttctcattctatatggacaaattttatcgggcaaaaagaaaaacttgcaacctttgcgattagtttttatgactatgaaggtggtgcgcacggtattgaaggtaatcgctatttcacgattgatctaactacacgccatattttgacattaaatgatttatttaatgaaaaagatttaccgaaagtaaaaacgcttttatgggaacaatataataatagcaataaggaatatgaacctattattgaagccgatagttttaatttatcgaacaatatttacttagattcaaaaggtgtacattttatttatgatgtttatgaaattgccccttacgcagcaggagagcaagatttaatgctccattttgggcaactagaagaattatttaaaccagaatttagacagggtaatgatatttaa

SEQ ID NO: 1480 - protein, 284 aa, Haemophilus influenzae
MKKTLVAALISSVILLTGCQDKDTEAKIKQLNQTVAQLNAENAKLKQQIEKTVPAIFVENDEIFNQSEIIKHPKSKEDYQPEETKIEYSISTIKTNIDWLNDLLWKKLTENEETKNISREQFVARYQTAFEEDKKEAKETPSFGISHSIWTNFIGQKEKLATFAISFYDYEGGAHGIEGNRYFTIDLTTRHILTLNDLFNEKDLPKVKTLLWEQYNNSNKEYEPIIEADSFNLSNNIYLDSKGVHFIYDVYEIAPYAAGEQDLMLHFGQLEELFKPEFRQGNDI

SEQ ID NO: 1481 - DNA, 297 bp, Haemophilus influenzae
atggcacttacgaattcctctatcagctttagaacagttgagcaaacaaaatcagaagcttatcaagttattgaacaatatggacttaccccatcacaagtattcaatatgtttttggctcaaattgccaagactcgttctatccctattgatttgaattatcttcgcccaaataaagaaaccctagcagctattgatgaattagatagtggtaacgcagagagcttctttattgaagctagtgaaaattattctgccgaagaatttacaaaacgcattcttaatggtggtcaataa

SEQ ID NO: 1482 - protein, 98 aa, Haemophilus influenzae
MALTNSSISFRTVEQTKSEAYQVIEQYGLTPSQVFNMFLAQIAKTRSIPIDLNYLRPNKETLAAIDELDSGNAESFFIEASENYSAEEFTKRILNGGQ

SEQ ID NO: 1483 - DNA, 309 bp, Haemophilus influenzae
atgtcagaagagaagccattaaaagtaagctattcaaaacaatttgtaagagatttaactgatttagctaaacgctcccccaatgtgttaattggctcaaaatacattactgcaatatactgtttattaaatcgtttacctttacccgaaaactaccaagatcacgcattagtaggagagtggaaaggttatcgagattgccatattcaaggcgatttggtactgatttaccaatacgttatacgcgatgaatttgatgaattgaaattttctcgtttaaatacacactcacaaaccgctttaaaatag

SEQ ID NO: 1484 - protein, 102 aa, Haemophilus influenzae
MSEEKPLKVSYSKQFVRDLTDLAKRSPNVLIGSKYITAIYCLLNRLPLPENYQDHALVGEWKGYRDCHIQGDLVLIYQYVIRDEFDELKFSRLNTHSQTALK

SEQ ID NO: 1485 - DNA, 3183 bp, Haemophilus influenzae
  misc_feature 4, 5, 6, 7, 8: n is any nucleotide
atgnnnnnaccaaccaaccaaccaaccaaccaaccaaccaaccaaccaaccaaccaaccaaccaaccaaccaaccaaccaaccaaccaaccaaccaaccaaccaaccaaccaaccaaccaaccaaccaaccaaccaaccaaaatagtaatgtttctgaacaactagaacaaattaatgtttcaggttcatcagaaaatattaatatcaaagagaaaaaagtcggggaaacccaaatttctgctaaaaaattagcgaaacagcaggcgtctgattctcgtgatctcgttcgctatgaaacaggtattacggtagttgaaactggtagaacgggcgcaagtggttatgcagttcgaggggttgatgaaaaccgtgtaggtattatggttgatgggcttcgtcaagctgaaactttaagctctcaaggatttaaagaactatttgaaggctatggcaattttaataatactcgtaatagcattgaaattgaaaatgttaaaacagcaactattaccaaaggtgctgactccttaaaatccggtagtggcgcattgggtggctctgttatatttgaaactaaagatgctcgagattatctgctagataaagattattatctttcctataaacgtggctatcaaacaatgaataatcaaaaccttaatgcacttacattcgcaggacgttataaaaaatttgatattttagtcgttgatacaaaacgtgatgggcacgaaatagaaaactacgattataaaatttatcccaataaacagactgattttagtgcggttggtcctacccgtgaaaaagccgatccgtatcaaattacccgccaaagtactttaataaaactgggctttcagcctaatgaaaaccatcgtttgagtgtggcattagatgattccactttagaaacaaagggtatggatttatcttatattttcaatcaatgcagaaatagtacatgtgcggaaacatatggcgagcgagttattaatgatcaatctaaaagaaaaaatatccaatttagttatgaaaacttcacccaaacccctttttgggatcatattaaactaagttattcttcacaaaaaattaccaataaagcacgttctgatgaatattgtcatcaacctacttgtaatggtgtaagcaaccctcaagggctacatttagtagaagaggagggcgtttacaagattaaagataaagataatagagaatttacaggaacatataattatggcttagaactaaaaaaccacaaggatgaagatgttagtaatggtgtagatacagaaggaggggcacttgattctgttttaattaattgtgaaaaattaaattgtgaaaataaaaaatttcgggtttttgttgaaaacgatgaaaactacaatagcaaatacacttatgagaataaaccaatagaagttaaaacattacctaatggaaaaaaatatggcgaaatcccactaaaatcaaaaaacggtacttatttaacccaatatgaaagtgctaaatttttatttccaaaaagttctggctatagtacagactccgttaatgatcgtgatttaaacaccaacacccaacaaattaagcttgatttagataaagaatttagcctttggcatacccaacaccaactaaaatatggtggtctttatgaaaaaacactaaaaagtatggtgaatcatcaatacaacactgttgccaatgtgcaatggtgggctggcaattttttctgtaacaaacctgtagatggcacatatcctgtggagcatactcctgcacctgattatagtgcttacagatgtagcttaatgaatactaataaaggcaaagattcctatttaatccctgtaacgactaaaaataatgtgttgtattttggagacaatatgcaactaacctcttggctaggactagatttaaattatcgctatgaccacgtaaaatatttacctagttatgacgaaaacattccagttcctaatggattaattactgggctatttaagaaatttggcttaaaagactatgtttatggtagtaaatattcgaagcctgcaggatatactgattgcacttacaccacagagtgttataaacaaaattttaaagacaatcttgccctgttattacgcaaaactgactataaacatcattcttacaatttagggttaaatcttgatcccacagattggcttcgtgtacaacttaaatacgccaatggttttcgtgcgccaacctctgatgaaatttatatgacatttaaacatccacaattttccattcagcctaacacagatttaaaagcagaaacctccaaaacaaaagaagtcgcgttcactttttataaaaacagcagttatattacgttaaatgcattccaaaacgattatcataattttattgatctagtagaagtaggcgaacgtcctattgaagaaggctctgttattcgttatccgttccatcagaaccaaaatcgagatcgagcaagagtcagaggtatcgaaattgcttcacgtcttgaaatgggcgatttgtttgaaaaactacaaggattccatttaggctataaatttacctatcaaaaaggcagaattaaagacaatggattaaatccaaaatataaagaatttttggaattgaataaagctcaacatccagaatacgaagccattgctcgtaaacctcaaccaatgaatgccttacaaccaaccacatcggtatataatattggctatgatgcaccaagccaaaaatggggcatggatgtgtatatcactaatgttgcagccaaaaaagcaaaagacagctttaattctcaatggacaagtatggttcaacgaaaagaaaagcaatataccgacgaagcaaaagatgtaccagcatcaaaagcaaacggcaaagaagtaaaagattctcgcggattatggcgtaataatcgctatacagtgatcgatacgattgcttattggaaaccaattaaaaatcttacatttaccgctggtgtgtataatttaaccaataaaaaatatctcacttgggactctgctcgctctgttcgacatcttggcacaattaaccgagtaaaaacagcaacaggtgaaggcttaaaccgcttctacgcacctggcagaaattacagaatgtctgttcagtttgagttttaa

SEQ ID NO: 1486 - protein, 1060 aa, Haemophilus influenzae
  VARIANT 2, 3: Xaa is any amino acid
MXXPTNQPTNQPTNQPTNQPTNQPTNQPTNQPTNQPTNQPTNQPTNQNSNVSEQLEQINVSGSSENINIKEKKVGETQISAKKLAKQQASDSRDLVRYETGITVVETGRTGASGYAVRGVDENRVGIMVDGLRQAETLSSQGFKELFEGYGNFNNTRNSIEIENVKTATITKGADSLKSGSGALGGSVIFETKDARDYLLDKDYYLSYKRGYQTMNNQNLNALTFAGRYKKFDILVVDTKRDGHEIENYDYKIYPNKQTDFSAVGPTREKADPYQITRQSTLIKLGFQPNENHRLSVALDDSTLETKGMDLSYIFNQCRNSTCAETYGERVINDQSKRKNIQFSYENFTQTPFWDHIKLSYSSQKITNKARSDEYCHQPTCNGVSNPQGLHLVEEEGVYKIKDKDNREFTGTYNYGLELKNHKDEDVSNGVDTEGGALDSVLINCEKLNCENKKFRVFVENDENYNSKYTYENKPIEVKTLPNGKKYGEIPLKSKNGTYLTQYESAKFLFPKSSGYSTDSVNDRDLNTNTQQIKLDLDKEFSLWHTQHQLKYGGLYEKTLKSMVNHQYNTVANVQWWAGNFFCNKPVDGTYPVEHTPAPDYSAYRCSLMNTNKGKDSYLIPVTTKNNVLYFGDNMQLTSWLGLDLNYRYDHVKYLPSYDENIPVPNGLITGLFKKFGLKDYVYGSKYSKPAGYTDCTYTTECYKQNFKDNLALLLRKTDYKHHSYNLGLNLDPTDWLRVQLKYANGFRAPTSDEIYMTFKHPQFSIQPNTDLKAETSKTKEVAFTFYKNSSYITLNAFQNDYHNFIDLVEVGERPIEEGSVIRYPFHQNQNRDRARVRGIEIASRLEMGDLFEKLQGFHLGYKFTYQKGRIKDNGLNPKYKEFLELNKAQHPEYEAIARKPQPMNALQPTTSVYNIGYDAPSQKWGMDVYITNVAAKKAKDSFNSQWTSMVQRKEKQYTDEAKDVPASKANGKEVKDSRGLWRNNRYTVIDTIAYWKPIKNLTFTAGVYNLTNKKYLTWDSARSVRHLGTINRVKTATGEGLNRFYAPGRNYRMSVQFEF

SEQ ID NO: 1487 - DNA, 156 bp, Haemophilus influenzae
caaccaaccaaccaaccaaccaaccaaccaaccaaccaaccaaccaaccaaccaaccaaccaaccaaccaaccaaccaaccaaccaaccaaccaaccaaccaaccaaccaaccaaccaaccaaccaaccaaaatagtaatgtttctgaacaactag

SEQ ID NO: 1488 - protein, 51 aa, Haemophilus influenzae
QPTNQPTNQPTNQPTNQPTNQPTNQPTNQPTNQPTNQPTNQPTKIVMFLNN

SEQ ID NO: 1489 - DNA, 1299 bp, Haemophilus influenzae
atgtcattaaatattgaaacaactcaaggtttagaacgtcgcgtagcgatcaccgttccaactgaaattgtctctaaagccattcgtgaagaatttaaacgtgctgcaaaaaatgtgcgcgtagatggtttccgtaaaggtcatgttcctgcccatatcattgaacaacgttttggggcgtcaattcgtcaagatgtattaaacgatttattaccacgtcatttttttgatgctgttattgcagaaaaaattaatattgtaggtcgtccaacttttgcgattgaaacttttgaagaaggtaaagacttagttttcaatgcaactttcgaggtttatccagaagttaaattacaaggtttggaaaatatcaaagttgaaaaaccaactgttgaaatcacggaagctgatattgataaaatgatcgatgtgttacgtaaacaacaagctacttgggctgaaagtcaagatattgcaaaagcagatgatcgcgtcactattgattttgttggctctgtagatggcgaagaatttgaaggtggtaaagctactgacttcgtattatttatgggtcaaggtcgtatgatccctggttttgaagaaggaattgtcggtcataaagtaggtgagcaatttgatattgatgtgattttcccagcggaataccacgcagaaaacttgaaaggtaaagcggcaaaatttgcgattactttgaaaaaagtcgaaaatatggtattgcctgaattaaccgatgagtttgtcgctaaatttggccctaatactaagtctgttgctgatttgcgtgcagaaatccgtaaaaatatggaacgtgaattgaaaaatgcgttagtttctcgtgttaaacaacaagtaatcaatggtttaattgaacaaaatccgattgatgtacccgcttctgcagtagaagaagaaattaatgtattacgcaatcaagcggctcaacgttttggtggcaatacacaacaagctgcacaattaccacgtgaattatttgaagctgaagcaactcgtcgtgttcaagtaggtttattattctctgaagtgattaaatctaatgaattaaaagctgatgaagaacgtgctaaagcaatgattgcagatattgcatcagcttacgagcagccagcagaagtggtggaatattacagcaaaaacgaagagttaatgaataatattcgtaatgtcgtattagaagaacaagctgttgatgcagtacttgcaaaagcacaagtaacagaaaaagtttcttcattcgatgaaattatgaatccacaagcataa

SEQ ID NO: 1490 - protein, 432 aa, Haemophilus influenzae
MSLNIETTQGLERRVAITVPTEIVSKAIREEFKRAAKNVRVDGFRKGHVPAHIIEQRFGASIRQDVLNDLLPRHFFDAVIAEKINIVGRPTFAIETFEEGKDLVFNATFEVYPEVKLQGLENIKVEKPTVEITEADIDKMIDVLRKQQATWAESQDIAKADDRVTIDFVGSVDGEEFEGGKATDFVLFMGQGRMIPGFEEGIVGHKVGEQFDIDVIFPAEYHAENLKGKAAKFAITLKKVENMVLPELTDEFVAKFGPNTKSVADLRAEIRKNMERELKNALVSRVKQQVINGLIEQNPIDVPASAVEEEINVLRNQAAQRFGGNTQQAAQLPRELFEAEATRRVQVGLLFSEVIKSNELKADEERAKAMIADIASAYEQPAEVVEYYSKNEELMNNIRNVVLEEQAVDAVLAKAQVTEKVSSFDEIMNPQA

SEQ ID NO: 1491 - DNA, 582 bp, Haemophilus influenzae
atgagtgtaattcctatggtcgttgaacagacttcgcgtggcgaacgttcgtacgacatttattcccgtttattaaaagaacgtgtgattttcctaagtggagaagtggaagatcgtatggcaaatttaattgtggcacagttgctttttttagaatcggaagatccaactaaagatattaatatttatattaactctcccggaggttctgtaaccgcaggtatggcaatttacgacacaatgcaatttattaagccagatattcgcactctttgtattggtcaagcctgttcaatgggcgcattcttgcttgctggcggaactgctggcaaacgagctgcgttgcctaatgcacgagtgatgattcatcaacctttgggtggtttccgtggtcaagcatcggatattcaaattcacgcacaagaaattttgaaaattaaacacaccttaaatgatcgtttagcattccatactggacaaagtattgagcgtattgagaaagataccgaccgcgataattttatgtcagctgaagaagcacaagcgtatggtttggtggatgaagtcttggttaaacgttaa

SEQ ID NO: 1492 - protein, 193 aa, Haemophilus influenzae
MSVIPMVVEQTSRGERSYDIYSRLLKERVIFLSGEVEDRMANLIVAQLLFLESEDPTKDINIYINSPGGSVTAGMAIYDTMQFIKPDIRTLCIGQACSMGAFLLAGGTAGKRAALPNARVMIHQPLGGFRGQASDIQIHAQEILKIKHTLNDRLAFHTGQSIERIEKDTDRDNFMSAEEAQAYGLVDEVLVKR

SEQ ID NO: 1493 - DNA, 1236 bp, Haemophilus influenzae
atgacagacaaagataaagatttgcactgttctttttgcggaaaagaaaaaggcgaagtagataaattaattgctggcacagacggttatatttgtaatgaatgtattgaactttgtcactcaatgcttgaagaaagtaatgatgaaaatttagaggaaagtgcggtcgaaaataaagataaattgccaacgcctcacgaaattcgcgcccatctggatgattatgttatcggtcaagattatgcgaaaaaagtgctttctgtggcagtttataatcattataaacgcttgcgaactaactatgaaagcaatgatgtagagcttggcaaaagtaatattttacttatagggcctacaggtagcggaaaaacgttacttgcgcaaacattagctcgtcgtttaaatgtaccctttgcgatggcggatgcaaccacattaacggaagctggttatgtgggagaagatgtggagaatgtattacagaaacttttgcaaaattgtgaatacgatactgaaaaagcagagaaaggcattatttatattgatgaaattgataaaattagccgtaaatcggaaggcgcatcaattactcgagatgtttcaggggagggggtgcaacaggctttattaaaacttattgaaggtacaatcgcttccattccacctcaaggcggtcgtaaacatccacaacaagaaatggtaaaattggatacgtctaaaattctctttatttgcggcggtgcatttgcaggattagataaaattattgataaacgcactcaaaccagtacgagtattggttttaatgccaaagttgaaaaagatgaaaaacaacaatctctttctgaattattccgtcaagttgaacctgatgatttgatgaaatttggtttaattccagaatttattggacgcttgccaatgattgccccattaagtgaattagacgaagatgcgctgatacaaattctcacaaaaccaaaaaacgcattaatcaaacaatatcaagccttatttggattggaaaaagtagaattggatttcacaccagaagcattaaaagcaatggcgaaaaaagcacttgaaagaaaaacaggtgcgcgtggcttacgttctatcgtagaagcagtgttgttagatacaatgtatgatctaccgtctcttgagaatttacaaaaagttatcgttgatgaatcgacaattgtagataatcttgcgcccaaattagaatattag

SEQ ID NO: 1494 - protein, 411 aa, Haemophilus influenzae
MTDKDKDLHCSFCGKEKGEVDKLIAGTDGYICNECIELCHSMLEESNDENLEESAVENKDKLPTPHEIRAHLDDYVIGQDYAKKVLSVAVYNHYKRLRTNYESNDVELGKSNILLIGPTGSGKTLLAQTLARRLNVPFAMADATTLTEAGYVGEDVENVLQKLLQNCEYDTEKAEKGIIYIDEIDKISRKSEGASITRDVSGEGVQQALLKLIEGTIASIPPQGGRKHPQQEMVKLDTSKILFICGGAFAGLDKIIDKRTQTSTSIGFNAKVEKDEKQQSLSELFRQVEPDDLMKFGLIPEFIGRLPMIAPLSELDEDALIQILTKPKNALIKQYQALFGLEKVELDFTPEALKAMAKKALERKTGARGLRSIVEAVLLDTMYDLPSLENLQKVIVDESTIVDNLAPKLEY

SEQ ID NO: 1495 - DNA, 417 bp, Haemophilus influenzae
atggcaaccgaaattgttgataaaaagaaaaatacgcaagaagtgatcgttgaaggcaagtctaaaggtttaaatacattcctttgggttttagctgtgatcttttttgcagctgcggctattgggaatatttatttccaacaaatctattctttaccgattcgtgttattggtatggctattgcgttagtcattgcatttattttagcggcaattactaatcaaggaacaaaagcacgcgcattctttaatgactctcgcacagaagcgcgtaaagtcgtatggccaacccgtgctgaagcacgtcaaacaacattgatcgttatcggggtaacaatgattgcttctctcttcttttgggcagtagattcgattattgtgacagtaattaatttcttaactgatttgagattctaa

SEQ ID NO: 1496 - protein, 138 aa, Haemophilus influenzae
MATEIVDKKKNTQEVIVEGKSKGLNTFLWVLAVIFFAAAAIGNIYFQQIYSLPIRVIGMAIALVIAFILAAITNQGTKARAFFNDSRTEARKVVWPTRAEARQTTLIVIGVTMIASLFFWAVDSIIVTVINFLTDLRF

SEQ ID NO: 1497 - DNA, 558 bp, Haemophilus influenzae
atgactgaagaaacaacagtatcaaaaaaacgttggtatgtattacaagcgttttctggctttgaaagtcgtgtagctctaactttacgtgaatacatcaaacaacaacaaatggaagatcaatttggtgaagttttagtgccaactgaagaagtggtggaaaatgtagcaggaaaacgtcgcaaaagtgaacgtaaattttttccaggttatgtacttgtagaaatggaaatgaatgatgaaacttggcatctagtaaaaagcgtgccaagagtgatgggttttatcggtggtacaccagataaacctgcacctatttctaaacgtgaagcagatactattttaaatcgccttgaacaaaatactgataaacctcgtcatcgtaatgaatatcatccgggtgaggaagttcgtgtgactgaagggccatttgctgattttaatggtacagtagaagaagtggattatgaaaaaggtcgcttaaaagtctctgtatcaatttttggtcgtgcaacaccagttgagcttgaatttggtcaagttgaaaaaatacactaa

SEQ ID NO: 1498 - protein, 185 aa, Haemophilus influenzae
MTEETTVSKKRWYVLQAFSGFESRVALTLREYIKQQQMEDQFGEVLVPTEEVVENVAGKRRKSERKFFPGYVLVEMEMNDETWHLVKSVPRVMGFIGGTPDKPAPISKREADTILNRLEQNTDKPRHRNEYHPGEEVRVTEGPFADFNGTVEEVDYEKGRLKVSVSIFGRATPVELEFGQVEKIH

SEQ ID NO: 1499 - DNA, 753 bp, Haemophilus influenzae
atgaaaacaaaggcaattttgaccgcacttttgggtgccattgcactaacaggttgtgcaaataacaacgacacgaaacaagcgagtgagcgtaatgattcccttgaaggcttcaatcgaactatgtggaagtttaactataatgtgctagatcgctatgtattagaacctgttgcaaaaggttggaacaactatgtgcctaagccgatttcttctggtcttgctggcatcgcaaataatcttgatgagccagtcagtttcataaaccgcttaattgaaggcgaaccgaaaaaagcatttgttcactttaatcgtttttggattaacactgtatttggtctaggtggttttattgattttgcaagcgcaagcaaagaattacgcgtagataatcaacgtggatttggggaaactttaggcagttacggtgtagatgctggcacttatattgtgctaccgatttataatgcaacaacgccacgtcaattaacaggtgcagtggttgatgctgcttatatgtatccattttggcaatgggttggtggtccgtggtcgttagtgaaatatagtgtgcaagcagtggatacccgtgcgaaaaatatcaataatgcagaattgttacgtcaagctcaagatccatatattacgttccgagaagcttattaccaaaatttacaatttaaagtaaacgatgggaaattagtcgaaagcaaagaatcacttcccgatgacatactaaaagaaattgattaa

SEQ ID NO: 1500 - protein, 250 aa, Haemophilus influenzae
MKTKAILTALLGAIALTGCANNNDTKQASERNDSLEGFNRTMWKFNYNVLDRYVLEPVAKGWNNYVPKPISSGLAGIANNLDEPVSFINRLIEGEPKKAFVHFNRFWINTVFGLGGFIDFASASKELRVDNQRGFGETLGSYGVDAGTYIVLPIYNATTPRQLTGAVVDAAYMYPFWQWVGGPWSLVKYSVQAVDTRAKNINNAELLRQAQDPYITFREAYYQNLQFKVNDGKLVESKESLPDDILKEID

SEQ ID NO: 1501 - DNA, 390 bp, Haemophilus influenzae
atgactcaaattattcatactgaaaaagcaccggcagctattggcccttatgttcaagcggttgatcttggcaatttagttttaacctcagggcaaattcccgtgaatcctgtaacaggcgaagtgccagctgacatcgttgcacaagcacgccaatctttagaaaacgtgaaagcgattatcgagaaagcgggtttaaccgcagccgatattgtaaaaacaacggtttttgtgaaagatcttaacgacttttcagcagttaatgcagaatacgaacgtttctttaaagaaaataatcatcctaacttccctgctcgttcttgtgtggaagttgcgcgtttaccaaaagatgtgggattagaaatcgaagcgattgcagtgagaaaataa

SEQ ID NO: 1502 - protein, 129 aa, Haemophilus influenzae
MTQIIHTEKAPAAIGPYVQAVDLGNLVLTSGQIPVNPVTGEVPADIVAQARQSLENVKAIIEKAGLTAADIVKTTVFVKDLNDFSAVNAEYERFFKENNHPNFPARSCVEVARLPKDVGLEIEAIAVRK

SEQ ID NO: 1503 - DNA, 126 bp, Haemophilus influenzae
ttgtggggaaaattcacaaaaaattcaaggtgtaatgtaaaatttttgttatcagcagataaacaaaaagtgcggtcaaaaacttgcgagtttatgaccgcacttttaaacaagggttcaaaatag

SEQ ID NO: 1504 - protein, 41 aa, Haemophilus influenzae
MWGKFTKNSRCNVKFLLSADKQKVRSKTCEFMTALLNKGSK

SEQ ID NO: 1505 - DNA, 852 bp, Haemophilus influenzae
atgatgcgaattcttcttttcttggcaaccaatatggctgtaatgctggtattggggattattttaagtgtgactggtattgcaggaaatagtactggcggcattttaattatggcgttgctatttggttttgctggttcattaatttccttattcctgtctaaaacaatggcattacgttctgtagatggagaagtgattactcaacctcgtaatcaaactgaacgttggttaattgataccgttagtcgccaagcgcagaaagcgggtattcccatgccagatgtggcaatttatcattcacccgatgtgaatgcttttgcgacaggcgcgacaaaaagcaattctttggtagcagtgagtacgggattattaaacaacatgacggaggctgaagctgaagctgttttagcgcacgaaatttcccatatttccaatggggatatggtgacgatggcgttattgcaaggcgtattgaatactttcgtgattttcttatctcgtattattgcaacggcggtggcaagttcacgtaacaataatggagaggaaacgcgcagttcaggtatttatttcttggtttctatggtattggaaatgctctttggtgtgcttgcgagtattatcgcaatgtggttctctcgttaccgagaatttcgtgcagatgctggttccgcaagtttagtaggcaaagaaaaaatgattatggcactgcaacgtttgcaacaacttcacgaaccacaaaatctcgaaggttctttaaatgcctttatgattaatggtaaacgcagtgaactctttatgagccatccgccacttgaaaagcgtattgaagctttacgtaatctttaa

SEQ ID NO: 1506 - protein, 283 aa, Haemophilus influenzae
MMRILLFLATNMAVMLVLGIILSVTGIAGNSTGGILIMALLFGFAGSLISLFLSKTMALRSVDGEVITQPRNQTERWLIDTVSRQAQKAGIPMPDVAIYHSPDVNAFATGATKSNSLVAVSTGLLNNMTEAEAEAVLAHEISHISNGDMVTMALLQGVLNTFVIFLSRIIATAVASSRNNNGEETRSSGIYFLVSMVLEMLFGVLASIIAMWFSRYREFRADAGSASLVGKEKMIMALQRLQQLHEPQNLEGSLNAFMINGKRSELFMSHPPLEKRIEALRNL

SEQ ID NO: 1507 - DNA, 282 bp, Haemophilus influenzae
gtgcggtatgatatggctctgtttttcaaaagaaaaaagaatatgtctgaaatttccgtcacacaaaccctagatactttaggattacgttgtccagaacctgtgatgcttgttcgtaaaaatattcgtcatcttaacgatggagaaatactttttattattgctgacgatcctgcaacaacaagagatattccaagtttctgtcaatttatggatcataccttactgcaaagtgaagtggaaaaaccaccgtttaaatattgggtgaaaaaaggaaaataa

SEQ ID NO: 1508 - protein, 93 aa, Haemophilus influenzae
MRYDMALFFKRKKNMSEISVTQTLDTLGLRCPEPVMLVRKNIRHLNDGEILFIIADDPATTRDIPSFCQFMDHTLLQSEVEKPPFKYWVKKGK

SEQ ID NO: 1509 - DNA, 633 bp, Haemophilus influenzae
ttgaaaaaagaaatggcggaatacctcgttcctaaaagtgcggttgtttttgaagaagaaattaagaaaagccgttttattacttatttacagcataccgaaggtttagaagatgcaagagctttttgggcaaagactaaacaagaacatccaaatgctcggcatcattgttgggctgccgtagcaggtaagccaacagattctctacaacttggtttttctgatgatggcgaacctgctggaacggcaggaaagccaatgttgagtgcattgcaaggtagtcaattaggtgaaatcagtgcggtggtggttcgctattatggtggtattttgcttggaacgggcggattagttcgtgcttacggtaatggcgttcaacaagcgttaaagctgattgaaagcgaaattaaagttgaacgaacccctttcaaacttgattgtgactatagtcagctaaatttggttcaacaactttgtgaaaaatatcaggttgagattttatctcaagattttcaggtagatattcatttgattttaggtattagtgaaaaaacaatagaggcgttttcttcagaattaacggaaaagtcttcaggtagattagttattcaacttttagagataggcgaatag

SEQ ID NO: 1510 - protein, 210 aa, Haemophilus influenzae
MKKEMAEYLVPKSAVVFEEEIKKSRFITYLQHTEGLEDARAFWAKTKQEHPNARHHCWAAVAGKPTDSLQLGFSDDGEPAGTAGKPMLSALQGSQLGEISAVVVRYYGGILLGTGGLVRAYGNGVQQALKLIESEIKVERTPFKLDCDYSQLNLVQQLCEKYQVEILSQDFQVDIHLILGISEKTIEAFSSELTEKSSGRLVIQLLEIGE

SEQ ID NO: 1511 - DNA, 1464 bp, Haemophilus influenzae
gtgcgtattttatcgattatccgaattattggtattcttgtgatgtgtttttcaggtacgatgctagttccggcatttgttgctctgatttatggcgatgggggcggtaaggcatttatgcaggcttttgtgttgagtttgacggcaggcacattgctttggtggccgtgccatcaccataagcaagaattacgatctcgtgatggttttttgattgttgtggctttttggttagttttaggaagtttggcaacattgcctcttttattatttgattcaccgcatttaactattgcttcagccgtatttgaagcattttctggcttaactactacaggtgcaacggtaatgacggggctggataatttacctaaatctattttgttttatcgccagtttttacaatggttaggtggtatggggattatcgtattggctgtggcgataattccgctgttgggaattggtgggacacaattatatcgagcagaatcttcaggccctcttaaagatcaaaaatctttgcctaaaatttcagaagtggcgaaagctctatggattatttacgcttcattaactgttctttgtgccattgcatattggctgtcaggaatgaatctttttgatgccattgggcatagtttttcaacaatttcaaatggaggattttcaacgcacgatgcaagtatcggctattttaatcagccctctatctattggattacaacaatctttatgctaatttgtggtgtaaattttaacctgcacatttccgcttttcttgcactaggtaaaagaaatatttggcgaaattattggaaagatcccgaatttcgtttttttctaacaatgcaaattatttttattggtattgtatctctatctttatatagttacggtttagtttcagatatgaacgaggctctaacaaaaggtgcattacaattaacatcaatgtcaatgactgctggttatacgatttttgatattgataatcttcctccttttattggacttttactggtaatttctgcggtaattggcggttgtggcggttcaacaactgggggattaaaagcgatacggacacttatattgtggaaacaaatcgatcgagaactgcatagtttaatccatccaaatttagtacaaccaattcgaataggtaaaaatcgtctagcaccaagaatgatagaaagtatttgggcatttttcattatttttatactggtttattgggggtgtgtttttgctgttattctttgtggaatgaatacttttgatgcgatgggagccgtattcgccacattaacgaatgcaggaccgggacttggttttattcacgaaagttttattggtgttccagaaagtgctaaattagtctttagttttgctatgatctgtggacgtttagaaatgttttcattaatcgtgctgtttattccaagctattggaaaaaataa

SEQ ID NO: 1512 - protein, 487 aa, Haemophilus influenzae
MRILSIIRIIGILVMCFSGTMLVPAFVALIYGDGGGKAFMQAFVLSLTAGTLLWWPCHHHKQELRSRDGFLIVVAFWLVLGSLATLPLLLFDSPHLTIASAVFEAFSGLTTTGATVMTGLDNLPKSILFYRQFLQWLGGMGIIVLAVAIIPLLGIGGTQLYRAESSGPLKDQKSLPKISEVAKALWIIYASLTVLCAIAYWLSGMNLFDAIGHSFSTISNGGFSTHDASIGYFNQPSIYWITTIFMLICGVNFNLHISAFLALGKRNIWRNYWKDPEFRFFLTMQIIFIGIVSLSLYSYGLVSDMNEALTKGALQLTSMSMTAGYTIFDIDNLPPFIGLLLVISAVIGGCGGSTTGGLKAIRTLILWKQIDRELHSLIHPNLVQPIRIGKNRLAPRMIESIWAFFIIFILVYWGCVFAVILCGMNTFDAMGAVFATLTNAGPGLGFIHESFIGVPESAKLVFSFAMICGRLEMFSLIVLFIPSYWKK

SEQ ID NO: 1513 - DNA, 561 bp, Haemophilus influenzae
atggctcgtaagaaaaaaacacgtcgaattacagatattatgccaattcgcaaagcagataaaaaaatagatataacaaaagcacgctctggtaaaaagcttactcgttatgaattggatgctaaagctcgtgaagataagaaaaaacgtaagcataaaggtttagcttcaggatctcgtcatagtgcggttgaagaaaaagcgaataaacttcaaaatgaaattaaagatccaaaaattggtagtaagaaaaagataccgttggttgttgaatttgttaataagcctgaaaaaggtcaagtaattcctgtaataaaacaggtgaaaaaacaagatccaatgaaagagcttgaaaatctggaaaataatgaaattcttaatgaattattggatgctttagatgcgggtaaaactattagtaaatcagatcaacaatttgtagatgaatgcttagatcgaatttctgagttaatggaagaacttggcattgaagacgaagatgaaagcgaagatgatttataccgcactttcgagcgtatggatattaatcaatttaggtaa

SEQ ID NO: 1514 - protein, 186 aa, Haemophilus influenzae
MARKKKTRRITDIMPIRKADKKIDITKARSGKKLTRYELDAKAREDKKKRKHKGLASGSRHSAVEEKANKLQNEIKDPKIGSKKKIPLVVEFVNKPEKGQVIPVIKQVKKQDPMKELENLENNEILNELLDALDAGKTISKSDQQFVDECLDRISELMEELGIEDEDESEDDLYRTFERMDINQFR

SEQ ID NO: 1515 - DNA, 441 bp, Haemophilus influenzae
atgatttggatattttttgtcatcgcacttttcttggtaactggattgactctatatgcaatccgtttattaaagcagttaaaagttcaaaaggaattgattgctaaagctaagaataatcgggttatacgattaaaagagagcattgatattattgctcgtgcaatgcagtctggagaatgtaatccttctgaaggcgtaattcgtcttactatgctattaaggccttttggtaagaatttatcatcttatcctgcgatggctaatttatatgaagtggtgcgtgatatgcctacacatgatgaccgtaaactacttgaaaaaagagaaagaatgcgtctagatttagctcgagaaagtgcagaagcacagtttgaaaaaaatattaaacaagaattgtatattttattagaagatattaaatctattgagctaatttaa

SEQ ID NO: 1516 - protein, 146 aa, Haemophilus influenzae
MIWIFFVIALFLVTGLTLYAIRLLKQLKVQKELIAKAKNNRVIRLKESIDIIARAMQSGECNPSEGVIRLTMLLRPFGKNLSSYPAMANLYEVVRDMPTHDDRKLLEKRERMRLDLARESAEAQFEKNIKQELYILLEDIKSIELI

SEQ ID NO: 1517 - DNA, 627 bp, Haemophilus influenzae
atgcaagataagctaaaagttttattgattgacgaccatccgttaatgcgtcgtggcattaaacaacttgtagaattagacgataactttgaagtagtggctgacgtaagcagcggcacagaagggatttctgtggcattacaaacatcacctgatgtgatcattttagatctcaacatgaaaggactttctgggttagatacgctcaaaggattacgtgcagaaggcgttgatgcacgaatcttaattttaacagtgtctgatgcaaaaaatgatatttatactctgattgatgctggtgcagatggttatttgttaaaagatactgaaccagatactttgctagagcaaatcaagcgcatagcacaaggcgaagtcattctgagtgattctattaaaaatttattattagaacgtactcacgaagataatccgttagacagcttaacggatcgcgaaatgggcgtacttcgtcaaattgcaactggcttatcaaacaaacaaattgcagcacaactgtttatttcagaagaaaccgtaaaagtacatatccgtaatttattacgtaaattaaatgttcattctcgtgttgcagcaacggtattattttttgaacaaaatcgttaa

SEQ ID NO: 1518 - protein, 208 aa, Haemophilus influenzae
MQDKLKVLLIDDHPLMRRGIKQLVELDDNFEVVADVSSGTEGISVALQTSPDVIILDLNMKGLSGLDTLKGLRAEGVDARILILTVSDAKNDIYTLIDAGADGYLLKDTEPDTLLEQIKRIAQGEVILSDSIKNLLLERTHEDNPLDSLTDREMGVLRQIATGLSNKQIAAQLFISEETVKVHIRNLLRKLNVHSRVAATVLFFEQNR

SEQ ID NO: 1519 - DNA, 1248 bp, Haemophilus influenzae
atgaatttcttccaatataaacataacaaactttatgccgaagatatgccagttcaacaacttgctgaacaatttggcacgcctctctatgtatattctcgtgcgacacttgaacgccattggcacgcttttgactctgctttcggtaagcaccctcacttaatttgttttgccgtgaaatcttgctcaaatattggcgtgttaaatattatggcaaaactaggttcaggtttcgatattgtctcgcaaggcgaacttgagcgtgtactggcagcaggtggcgatgcgtcaaaagtggtcttttctggcgttgcgaaatctcgagaagaaattatgcgtgcattagaagttggaatccgttgctttaatgtggaatcagtttctgaactcaagcacattaaccaaatcgcaggagaaatgggtaaaatcgcacctatttctttacgtgtaaatccagatgttgatgcacatacacacccttatatttcaacaggattaaaagaaaataaatttggtgtaagcgtaaatgaagctcgagaggtatataaattagcctcaacgctaccaaacataaaaataacagggatggattgccacataggctcacagctcaccgaattacaaccattcttagatgcaacagatcgcttaattgtcctaatggaacaattaaaagaagatggaattacattaaaacatctcgatctgggcggtggtttaggcgtgacttatacggatgaaacaccaccgcatccaagcgattacgcaaatgcgttattagaaaaactaaaaaattatcccgaacttgaaattattcttgaacctggcagagcaatttctgccaatgcaggaattttagtagcaaaagtacaatacttaaaaagtaatgaaagccgtaatttcgccattaccgatacaggaatgaacgatatgatccgaccagcattgtatgaggcttacatgaacatcgtcgaaattgaccgcactttagaaagagaaaaagccatttatgatgttgtgggaccagtttgcgaaacgtctgatttcttaggcaaacaacgggaactttcaattgccgaaggggattatattgctcaatgttctgctggtgcctatggagcaagtatgtcatcaaactataactcaagagcccgcactgcagaagttttagtagatagagataaatcctatttaattcgtcgtcgagaaaccttacaggaactttgggcattagaatcgaccatttaa

SEQ ID NO: 1520 - protein, 415 aa, Haemophilus influenzae
MNFFQYKHNKLYAEDMPVQQLAEQFGTPLYVYSRATLERHWHAFDSAFGKHPHLICFAVKSCSNIGVLNIMAKLGSGFDIVSQGELERVLAAGGDASKVVFSGVAKSREEIMRALEVGIRCFNVESVSELKHINQIAGEMGKIAPISLRVNPDVDAHTHPYISTGLKENKFGVSVNEAREVYKLASTLPNIKITGMDCHIGSQLTELQPFLDATDRLIVLMEQLKEDGITLKHLDLGGGLGVTYTDETPPHPSDYANALLEKLKNYPELEIILEPGRAISANAGILVAKVQYLKSNESRNFAITDTGMNDMIRPALYEAYMNIVEIDRTLEREKAIYDVVGPVCETSDFLGKQRELSIAEGDYIAQCSAGAYGASMSSNYNSRARTAEVLVDRDKSYLIRRRETLQELWALESTI

SEQ ID NO: 1521 - DNA, 132 bp, Haemophilus influenzae
gtgagagagagaaaaatgaaaaaactactatcaattttagtgcttagtgcaatttgcattgtgacaacaggatgcggcgtaaaaggttctttatattttcctgaaaaagatcaagctcaacaaactcaataa

SEQ ID NO: 1522 - protein, 43 aa, Haemophilus influenzae
MRERKMKKLLSILVLSAICIVTTGCGVKGSLYFPEKDQAQQTQ

SEQ ID NO: 1523 - DNA, 306 bp, Haemophilus influenzae
atgaatattgcagaatttcaccaaaatattgaacaagtttggcaaaaaattgaagaagaattggaaaaccaaggcgcagatgtggattgcgaaacgcaaggttcagtatttacaatcacctttgataatcgcacacaaatagtgattaacaagcaagaaccgctgcttgagctttggattgcaagtaaattaggcggtttccattttgcttttaaaaatggcgactgggtttctaatgacggacaacgtttttgggattgtttcgttgaagcctgtgctgcacatggcgagaacgtgcagttctaa

SEQ ID NO: 1524 - protein, 101 aa, Haemophilus influenzae
MNIAEFHQNIEQVWQKIEEELENQGADVDCETQGSVFTITFDNRTQIVINKQEPLLELWIASKLGGFHFAFKNGDWVSNDGQRFWDCFVEACAAHGENVQF

SEQ ID NO: 1525 - DNA, 1860 bp, Haemophilus influenzae
atgctggattctcctttaccatcaaaaataatagaaaaaccgaccgcactttctgttttgaaatcggttttcggttatcaatctttccgtaaagggcaggaagaagttattaatgctgctttaaatggacaagatgcgttggtggtaatggcaacggggaatggcaaatcgctttgttaccaaattcccgcactttgttttgatggtttaactttagtgatttctccgctgatttccttgatgaaagatcaagtggatcagctgcaagctaatggaattgaggcggattttcttaattctagtcagactttagaacagcagcaacaagtacaaaataagcttatttctgggcaacttaaactactttatgtgtcgccagaaaaagtgatgacgaacagtttctttcaacttatttcttatagcaaagtctgctttattgcgattgatgaagcacattgtatttctcaatgggggcatgactttcgccctgaatatacccagcttggcggtttaaaagccagtttccctgatgcgccgattatggcacttacggcaacggcagattatgcgactcaacaagatattctgcggcatcttaatctgaaaaatctgcacaaatacattggtagttttgatcgaccaaatattcgttataccttggaagaaaaatacaaaccaatggaacaactgacacgttttgtgttggctcaaaagggcaaaagtgggattatttattgcaacagcagaaataaggttgagcgaattgcggaaagtttacgcaataaaggtgtctctgctgctgcttaccacgcaggaatggaaacggcaattcgtgaacgtgtgcaacaggattttcagcgtgataatgttcaagtagtagtcgcaaccattgcttttggaatggggattaataaatccaatgtgcgctttgttgcccattttgatttaccacgtagcattgaatcttactatcaagaaacaggtcgagcaggacgtgatgatttgcctgccgaggcggttttgttttatgaaccagctgattacgcttggttacaaaaaattctcttcgaaaaaccagaaacgccacagcgtcagattgagcaacataaattagaagctattggggaatttgcggaaagccagacttgtcgccgtttagttcttctcaattattttggcgagcatcgacaaacaccatgcaataactgtgatatttgccttgatcctcctaaaaaatatgatggtttagtcgatgcgcaaaaagtaatgtctactatttatcgagtggggcaatgttttggtgcacattatgtgattgcggtgctgcgtggcatgcacaatcagaaaattgttgaacgccaacaccataaactttcagtatatggcattggaaaagataaaagtaaagagcattggcagtctgtcattcgtcagcttattcatttgggttttgtgcaacaggttattagtgaattaaatccaacgttgcaacttactgaaagtgcgaaagtgattttgaaaggcgaagaaccgttagaattggcaatgcctcgtatttctgcaatcagtaaaattgctcataatccacaacgtcaaggtgttgcaaattacgataaggatttatttgcacgcttgcgtttcttacgcaaacaaattgccgataaagaaaatattccgccgtacattgtctttaatgatgcgacgttgcaagaaatggcacaatatatgccaacaagcaatattgaaatgttgcaaattaatggcgtgggctctatcaaattagagcggtttgggcagccgtttatggcattgattcaagaacataaggcaattttggcgaatgcgcaaaataatgactaa

SEQ ID NO: 1526 - protein, 619 aa, Haemophilus influenzae
MLDSPLPSKIIEKPTALSVLKSVFGYQSFRKGQEEVINAALNGQDALVVMATGNGKSLCYQIPALCFDGLTLVISPLISLMKDQVDQLQANGIEADFLNSSQTLEQQQQVQNKLISGQLKLLYVSPEKVMTNSFFQLISYSKVCFIAIDEAHCISQWGHDFRPEYTQLGGLKASFPDAPIMALTATADYATQQDILRHLNLKNLHKYIGSFDRPNIRYTLEEKYKPMEQLTRFVLAQKGKSGIIYCNSRNKVERIAESLRNKGVSAAAYHAGMETAIRERVQQDFQRDNVQVVVATIAFGMGINKSNVRFVAHFDLPRSIESYYQETGRAGRDDLPAEAVLFYEPADYAWLQKILFEKPETPQRQIEQHKLEAIGEFAESQTCRRLVLLNYFGEHRQTPCNNCDICLDPPKKYDGLVDAQKVMSTIYRVGQCFGAHYVIAVLRGMHNQKIVERQHHKLSVYGIGKDKSKEHWQSVIRQLIHLGFVQQVISELNPTLQLTESAKVILKGEEPLELAMPRISAISKIAHNPQRQGVANYDKDLFARLRFLRKQIADKENIPPYIVFNDATLQEMAQYMPTSNIEMLQINGVGSIKLERFGQPFMALIQEHKAILANAQNND

SEQ ID NO: 1527 - DNA, 1719 bp, Haemophilus influenzae
atgcgtacaagtcaatatttattttccaccctaaaagaaacgccaaatgatgctcaggttgtgagccaccaattaatgttgcgtgcaggtatgattcgcccaatggcatcaggtttatataactggctaccgacgggtattcgcgtattgaaaaaagtggaaaaagttgttcgcgaagagatgaacaaaggtggtgccattgaggtattaatgccagttgtgcaaccagcggaattatgggaagagtctggtcgttgggatcaatatggccctgaattgcttcgttttgaagaccgtggaaaccgtaactttgtacttgggccaactcacgaggaagtgattacagatttagtccgccgagaagtttcttcatacaaacaactcccacttaacttatatcaaattcaaacgaaattccgtgatgaagtgcgccctcgttttggtgtaatgcgttcgcgtgaatttattatgaaagatgcgtattctttccacacgacacaagaaagtttacaagcaacctatgatgtgatgtatcaagtgtacagtaacatttttaaccgtttaggcttagatttccgtgcggtgcaagcggatacaggttcaatcgggggttctgcttctcacgaattccaagtgttagcttcaagcggggaagatgatgttgtgttctcaacggaatcggattttgccgcgaatattgagcttgcagaagcaattgctataggcgaacgccaagctccaaccgctgaaatgtgtttagttgatacaccaaatgcgaaaaccattgcggagttagtagaacaatttaatctgccgattgaaaaaaccgtgaaaaccttgattgtgaaaggtgcagacgaaaaccaaccgcttgttgcgttgattattcgcggcgaccatgaattaaacgagatcaaagcacaaaaacacccgttagtggcagatcctcttgagtttgcggacgaaacagaaatcaaagcgaaaattggtgcgggcgtgggatcgttaggcgcggtaaatcttaatattcctgcaattattgaccgcactgtggcgttaatgtctgattttagttgtggtgcgaatattgatggaaaacattatttcaatgtaaactgggaacgtgatgtagcaatgccagaagtatttgatttacgtaacgtagtggaaggtgatccaagtccagatggtaaaggcacgcttcaaatcaagcgtggtattgaagtgggacatattttccaactgggtaaaaaatactctgaagcgatgaacgcgaccgttcaaggtgaagatggtaaacctcttgtgatgacgatgggttgctacggtattggtgtaactcgtgtggtggcttcagcgattgaacagcatcatgatgatcgcggtatcatctggccatcagacgaaatcgccccattcactgtggcgattgtgccaatgaacatgcacaaatctgaagccgtgcaaaaatacgctgaagaactttaccgcactttacaatcgcaaggcgtagatgtgatttttgatgatcgtaaagaacgcccaggtgtgatgtttgcagacatggaacttatcggtgtaccgcatatggtggtaatcggtgagaaaaacctagacaacggtgaaattgaatataagaatcgtcgtaccggtgaaaaagaaatgattagtaaagataaattgctcagtgttttaaacgaaaagttaggtaatctctaa

SEQ ID NO: 1528 - protein, 572 aa, Haemophilus influenzae
MRTSQYLFSTLKETPNDAQVVSHQLMLRAGMIRPMASGLYNWLPTGIRVLKKVEKVVREEMNKGGAIEVLMPVVQPAELWEESGRWDQYGPELLRFEDRGNRNFVLGPTHEEVITDLVRREVSSYKQLPLNLYQIQTKFRDEVRPRFGVMRSREFIMKDAYSFHTTQESLQATYDVMYQVYSNIFNRLGLDFRAVQADTGSIGGSASHEFQVLASSGEDDVVFSTESDFAANIELAEAIAIGERQAPTAEMCLVDTPNAKTIAELVEQFNLPIEKTVKTLIVKGADENQPLVALIIRGDHELNEIKAQKHPLVADPLEFADETEIKAKIGAGVGSLGAVNLNIPAIIDRTVALMSDFSCGANIDGKHYFNVNWERDVAMPEVFDLRNVVEGDPSPDGKGTLQIKRGIEVGHIFQLGKKYSEAMNATVQGEDGKPLVMTMGCYGIGVTRVVASAIEQHHDDRGIIWPSDEIAPFTVAIVPMNMHKSEAVQKYAEELYRTLQSQGVDVIFDDRKERPGVMFADMELIGVPHMVVIGEKNLDNGEIEYKNRRTGEKEMISKDKLLSVLNEKLGNL

SEQ ID NO: 1529 - DNA, 2349 bp, Haemophilus influenzae
atgaataaaaaacacactttaatttcacttgctattttgaccgcactttatagccaacaaagtttggcagatttgcatgaacaatgtttaatgggcgtgccaaaatttagcggtgaagtcatgacgggtgatgtgaattttctgcctgtatatattgaagcggataacgcagaaattaatcagccaaatgatgcgacctatcaaggtaatgtagatttgaaacaaggcaatcgccatttgttagcacaatccgtgcaggtcaaacaatctggaaaccaatcaacacctttacgcatggcttatgtccgcaatggatttgattataaagataatcagatcaatatgttgggtaaagatgcagagtttaatttagatagtcacgatggtaatttaacaaattcagaatatgaatttgtcggtcgtcaaggacgtggtaaagctgataatataacactgcataataattatcgtgtaatgaagaatgcaacctttacgtcatgtttgcacggcgacaatgcttgggctgtagatgcgtcagaaattcgtcaatacgtgaaagaagaatatgctgaaatgtggcatgctcgctttaaaatacacggtgttcccgtcttttataccccttacttacaattacccattggagatcgtcgtcgttctggtttattgattccaagcgcgggaacatctaaccgagatggtctttggtatgcacaaccaatttattggaatatcgcgcctaattatgatcttactttcaccccgaaatatatgtctcgccgtggttggcaagcaaatggggaatttcgctatttaacctctattggtgaaggtaaagtggcaggagaatatttaggtaaggatcgttactctgaatatgctagtgataatcgaaaacgtcatttgttctattggaatcacaattctagctttttacaaaattggcgtctaaatattaattacacccgagtaagcgataaacgttatttcaacgactttgattctatttatggacgcagtaccgatggttatgcgaaccaatatgctcgtatagcctattaccaaccaaattataatttttctctttctgcacatcagttccaaatttttgatgatattgtaaacatcggcccttaccgtgcagtaccacaattagatttcaactatcacaaatatgatttagcgaatggatggttaaatttcaaattacattcacaagcagttcgttttgataatgacagtaaattgatgccaactgcatggcgtttccatgcagaacctagcctaaattctttaatgtcaaataaatacggcagtttgaatattgaaacgaaactttatgcgactcgttacgagcagaaaaaaggttcaggaaaaaatgcagaggacgtgcaaaaaacagtaaatcgagttattccacaatttaaagttgatttacaaagtgtattagcacgcgatataacgttcttaaaagagtatacacaaaccttcgaaccgcacgtgcagtatttatatcgtccttaccgaaatcaaagcaatattggttcaacacttaataatgattatttgggatttggttacgattcagcattagtacagcaagattactattcgctattccgtgatcgccgttatagtggtttagatcgaatttcatcggcaaatcaagttaccttgggtggcacaacgcgtttttatgatattgctggcgaagaacgatttaatttatctgcaggtcaaatttattacttaaataattctcgtattgatgaaaaccctgcgaataaaacaccaacttcatcatctgcttgggcattagaatctaattggaaaataagtaataaatggtattggcgtggtagctatcaatttgatactcataccaattcaacatcattagcgaatacatcactagaatataatcctgaaaaaaataatttaattcagttaaattatcgatatgtgaaccaagaatatattgaccaaaacttaggtaaatcggctaacgcctatcaacaagatatccaacaagtgggattagttgtaggctgggaaattgccaataattgggctgtagtaggacgctattatcaagatctcgccttacaaaaaccagtagaacaatatctaggcgttcaatataacagttgctgttgggctgcaagtgttggtgtaaaacgcaatgtcacaaaccaccaaaaccaaacacgtaatgaaattgtttatgataatagcattggcataaccttagaattaagggggttaggcagcaatgaccatcaaagcggtattcaagagatgttagaaaaaggaaaactaccttatattcgagcatttagtttggattaa

SEQ ID NO: 1530 - protein, 782 aa, Haemophilus influenzae
MNKKHTLISLAILTALYSQQSLADLHEQCLMGVPKFSGEVMTGDVNFLPVYIEADNAEINQPNDATYQGNVDLKQGNRHLLAQSVQVKQSGNQSTPLRMAYVRNGFDYKDNQINMLGKDAEFNLDSHDGNLTNSEYEFVGRQGRGKADNITLHNNYRVMKNATFTSCLHGDNAWAVDASEIRQYVKEEYAEMWHARFKIHGVPVFYTPYLQLPIGDRRRSGLLIPSAGTSNRDGLWYAQPIYWNIAPNYDLTFTPKYMSRRGWQANGEFRYLTSIGEGKVAGEYLGKDRYSEYASDNRKRHLFYWNHNSSFLQNWRLNINYTRVSDKRYFNDFDSIYGRSTDGYANQYARIAYYQPNYNFSLSAHQFQIFDDIVNIGPYRAVPQLDFNYHKYDLANGWLNFKLHSQAVRFDNDSKLMPTAWRFHAEPSLNSLMSNKYGSLNIETKLYATRYEQKKGSGKNAEDVQKTVNRVIPQFKVDLQSVLARDITFLKEYTQTFEPHVQYLYRPYRNQSNIGSTLNNDYLGFGYDSALVQQDYYSLFRDRRYSGLDRISSANQVTLGGTTRFYDIAGEERFNLSAGQIYYLNNSRIDENPANKTPTSSSAWALESNWKISNKWYWRGSYQFDTHTNSTSLANTSLEYNPEKNNLIQLNYRYVNQEYIDQNLGKSANAYQQDIQQVGLVVGWEIANNWAVVGRYYQDLALQKPVEQYLGVQYNSCCWAASVGVKRNVTNHQNQTRNEIVYDNSIGITLELRGLGSNDHQSGIQEMLEKGKLPYIRAFSLD

SEQ ID NO: 1531 - DNA, 1410 bp, Haemophilus influenzae
atgccacgcctttcccgccgtcaattattaaaaacagctgcgatttctaccgcactttccacagtgcccacaccattgttagcggcaagccgtgaaaaactagttgtgccgccactaattgaagttcgtcgcggtcgcccgattgtattaaccatgcaggaaacgaattatccgttagatggctcacacaatgtgacagtatggggattcaacggtaattatcttggcccaaccattaaaatcaaatcaggtagctttgccaaacttaattatcataacaatttgccacaatcagttgctttatctattcaaggtttacaagcatcaggcgaactgtttggcggggcagctcgagttctcaaaaaaggcgaatcttgggcacccatcgtgcctattgaacaacccgcagcaagctgttggtatcgttccgcgacattagccaactcagcctatcaaacctatcgtggcttagctggaatgtggttaattgaagatgagcaaagcctaaaagcgaatcttcccaataaatacggcgtagatgatattccattgattttacaagatatggaatttaacaatgatggtctccaattattcaaacaaaatcaaccgcactttgtaggcaatcgcttattagtgaatggtattgaagcaccatatttagatgttgcacggggttggattcgtttacgtttgctcaatgcctcattagcgcgtgcttatgatttacgcttggataatgatcaagaaatgctgcttattgcacaagatttaggtttcttaccaaaagcgaaatcaatcaaatctttggttctctcgccaggagaacgtgcagaaatactggttaatatgaatgaaattgacaacgtatctctcattagcggaagtaaacgtagcttgtacgaaaaaataaaaaatatgttgttctcaggcgatgaactcgctaataacaccgtccttgaattgcgcgccaagggagaaatgtcagcatttaataaacaaccgaatctaactttcgaaacggatgcaccagcaatgttacaacaagccgttgcacaaactcgagaatttaatattgatgttacaaacggtttaattaatcaaagacgttttgacccacgcaaggttgatgttatggctcgtaaaggcaccattgaacgctggattttaaatgcaagtttacctgttggatttactattcaaggtgccaaatttgtggtggaaagccaaggagaacatcaattacaagctgaagaattagcttggaaagataccgtttgggtaaaaaacaaaactcaaattttagtgaaatttgatcaagcatcttctggcaactacccattcttatttggggtatcgaatttaatgttagaagatatgggctgtcttggcgtattgatggttcaatag

SEQ ID NO: 1532 - protein, 469 aa, Haemophilus influenzae
MPRLSRRQLLKTAAISTALSTVPTPLLAASREKLVVPPLIEVRRGRPIVLTMQETNYPLDGSHNVTVWGFNGNYLGPTIKIKSGSFAKLNYHNNLPQSVALSIQGLQASGELFGGAARVLKKGESWAPIVPIEQPAASCWYRSATLANSAYQTYRGLAGMWLIEDEQSLKANLPNKYGVDDIPLILQDMEFNNDGLQLFKQNQPHFVGNRLLVNGIEAPYLDVARGWIRLRLLNASLARAYDLRLDNDQEMLLIAQDLGFLPKAKSIKSLVLSPGERAEILVNMNEIDNVSLISGSKRSLYEKIKNMLFSGDELANNTVLELRAKGEMSAFNKQPNLTFETDAPAMLQQAVAQTREFNIDVTNGLINQRRFDPRKVDVMARKGTIERWILNASLPVGFTIQGAKFVVESQGEHQLQAEELAWKDTVWVKNKTQILVKFDQASSGNYPFLFGVSNLMLEDMGCLGVLMVQ

SEQ ID NO: 1533 - DNA, 723 bp, Haemophilus influenzae
atgttaaaactacttcgaattttcctcgtattaatctgctgtattctaatttgtatactgggtacgatttattcttttatccgctttaaaaatccaagcaacgtaggcattgttgcgcgttggtttgggcgtttatatccactttttggcttaaaggtagaacatcgtattcctcaagatcagaagcaaattagccgcgccatttatatcggtaatcatcaaaataattatgatatggtgacaatctcttatatggtgcaacctcgcacagtaagtgtgggtaaaaaaagcttaatttggatacccttcttcggcattttatattgggtaacgggtaatattttcttggatagagaaaaccgcacaaaagcacataatacgatgtcacagcttgcacgacgaattaatgaagataatttatcaatttggatgttcccagaaggcactcgcaatcgcggtcgcggtttattaccctttaaaacgggtgcattccatgcggcgatttcagcaggtgtaccaattattccagtggtgtgttcaagcacgcataacaaaattaatttaaatcgttgggataatggcaaagtgatttgcgaaataatggatccaatcgatgtttcaggctataccaaagacaatgttcgcgatcttgcggcttattgtcatgatctaatggaaaaacgcattgccgaacttgatgaagagatagcaaaaggaaactaa

SEQ ID NO: 1534 - protein, 240 aa, Haemophilus influenzae
MLKLLRIFLVLICCILICILGTIYSFIRFKNPSNVGIVARWFGRLYPLFGLKVEHRIPQDQKQISRAIYIGNHQNNYDMVTISYMVQPRTVSVGKKSLIWIPFFGILYWVTGNIFLDRENRTKAHNTMSQLARRINEDNLSIWMFPEGTRNRGRGLLPFKTGAFHAAISAGVPIIPVVCSSTHNKINLNRWDNGKVICEIMDPIDVSGYTKDNVRDLAAYCHDLMEKRIAELDEEIAKGN

SEQ ID NO: 1535 - DNA, 714 bp, Haemophilus influenzae
atgaaacatagctattttatttctgatttgcatttaagcgaaactcagccagaattgaccgcactttttgtcgattttatgcagaatcttgccccacaggctgaacggctttacattttgggtgatctttttgatttttggattggtgatgatgagcaatctgcattgattcaacaagttaaagatttaattaagtctgtaagcgagcaaggtgtgcaatgttattttcagcacggtaaccgtgatttcttaattggtgaacgtttttcaaaagaaacgggagctcagcttttacctgattatcaattgattacactttatgataaaaaaatcttactttgtcatggcgatacgctttgtattgatgatgaggcttaccaacaatttcgccgtagagtgcatcaaaaatggctgcaacgtttgtttttgtgcttgccattaaaagtgcgggtgataattgcggagaaaattcgagcaaagagtaatcaagataaacaagcgaaatcacaggaaattatggatgtaaaccaagccttcacggcagaaaaagtacaagagtttgatgtaaatttattaattcacggacacacacaccgtgaggcgattcatcaacaagaagaatttacccgaattgtattaggggattggcgaaaaaattacgcatcaattttaaaaatggatgaaagcggggaatttggttttattaaagattag

SEQ ID NO: 1536 - protein, 237 aa, Haemophilus influenzae
MKHSYFISDLHLSETQPELTALFVDFMQNLAPQAERLYILGDLFDFWIGDDEQSALIQQVKDLIKSVSEQGVQCYFQHGNRDFLIGERFSKETGAQLLPDYQLITLYDKKILLCHGDTLCIDDEAYQQFRRRVHQKWLQRLFLCLPLKVRVIIAEKIRAKSNQDKQAKSQEIMDVNQAFTAEKVQEFDVNLLIHGHTHREAIHQQEEFTRIVLGDWRKNYASILKMDESGEFGFIKD

SEQ ID NO: 1537 - DNA, 1527 bp, Haemophilus influenzae
atggctcactcagccccaaaagcacaaaagcgtgagactttttctggtcgtcgcgcatttattctggcagcaattggttctgccgttggtcttggtaatatttggcgttttccttacaccacttatgaaaacggtggtggcgcatttattatcccttaccttattgcattattaaccgcagggattcctcttttattcctagattatgccattgggcaccgtcatcgtggtggtgcgccactttcttatcgtcgttttagccctcactttgaggtgtttggctggtggcaaatgatggtgaatgtcatcatcggattatattacgctgtagtgttaggctgggcagcaagctacacatatttttccttcactggcgcgtggggcgataaacccattgatttcttcatcggtgaatttttaaaaatgggcgatattaaaaacggtatcagctttgaatttgttggtatggtaaccgcaccattaattgcgatgtggattgttgccttaggcgtgctttctatgggtgttcaaaaaggaattgctaaggtctcttccgtattaatgccagtgctcgtcgtgatgtttatggtgattgtgatttattccttattcttaccaggtgcggcaaaaggtttagatgcattatttacgccagattggtcaaaactttctaatccaagtgtgtggattgccgcctatgggcaaatcttcttctctctttcaatcggctttgggattatggtgacttacgcctcttatcttaaaaaagaattcgatttgacgggtagtggcttggttgtaggttttgctaacagtagctttgaagtgttagcaggtatcggcgtatttgcagcattaggttttattgctacagcgcaaggtcaagaagtcagcgaagtagcaaaaggcggaattggtttagcattttttgcgttcccaaccatcatcaataaagcaccatttggcgaagtgctaggcatgttattctttggttcattaacctttgccgcattgacttcattcatctcagttatcgaagtaattatttccgcaattcaggataaaattcgcattagccgtggaaaagtgacattcatcgtgggtgtaccaatgatgctagtttctgtcatcttattcggcacaacaactggcttaccaatgttagatgtgttcgataaatttgtgaactatttcggtattgttgccgtagcatttgcgtctttaattgcgattgtagcaaatgaaaaactcggtttattaggtaatcacttaaacgaaacgtcatctttcaaagtaggtttcttctggcgtttatgcattgtattaacgagtggtgttttagcatttatgcttttcagcgaaggggcaaaagtcttctctgagggttatgaaggttatccaaactggtttgtaaatacctttggttggggaatgtcgattagcttacttgtcgtggcatttttcctttctcgcttaaaatggaaaagcgaaaccaaattaacgattgatgaaactaaaggagaataa

SEQ ID NO: 1538 - protein, 508 aa, Haemophilus influenzae
MAHSAPKAQKRETFSGRRAFILAAIGSAVGLGNIWRFPYTTYENGGGAFIIPYLIALLTAGIPLLFLDYAIGHRHRGGAPLSYRRFSPHFEVFGWWQMMVNVIIGLYYAVVLGWAASYTYFSFTGAWGDKPIDFFIGEFLKMGDIKNGISFEFVGMVTAPLIAMWIVALGVLSMGVQKGIAKVSSVLMPVLVVMFMVIVIYSLFLPGAAKGLDALFTPDWSKLSNPSVWIAAYGQIFFSLSIGFGIMVTYASYLKKEFDLTGSGLVVGFANSSFEVLAGIGVFAALGFIATAQGQEVSEVAKGGIGLAFFAFPTIINKAPFGEVLGMLFFGSLTFAALTSFISVIEVIISAIQDKIRISRGKVTFIVGVPMMLVSVILFGTTTGLPMLDVFDKFVNYFGIVAVAFASLIAIVANEKLGLLGNHLNETSSFKVGFFWRLCIVLTSGVLAFMLFSEGAKVFSEGYEGYPNWFVNTFGWGMSISLLVVAFFLSRLKWKSETKLTIDETKGE

SEQ ID NO: 1539 - DNA, 492 bp, Haemophilus influenzae
  misc_feature 465, 466, 467, 468, 469: n is any nucleotide
atgacaggcgcacaactcattatggcgtgcttgaaagcacaccatgtcacgactcttttcggctatcctggtggcgcaattatgccaacctacgatgccctttatgacgcaggcttagatcacttactttgtcgtaatgaacaagggactgcaatggctgcgattggctatgctcgctccacgggaaaagtgggcgtctgtattgcaacatcaggccctggtgccactaatttagttattggattaggcgatgccatgatggactccattccagttgtcgccattactggtcaagttgcctcttcattaattggcacagatgctattgaaccttggcgtgagcaaatcagagatttaaaagcaaaattagatttcacttatgttgaaaatcaaggcaatcgcccgattgatccttgggcattactcaacagcctatctaatcgcaaaccaaataatgcgataatnnnnncattccattcattaattaattaa

SEQ ID NO: 1540 - protein, 163 aa, Haemophilus influenzae
  VARIANT 155, 156, 157: Xaa is any amino acid
MTGAQLIMACLKAHHVTTLFGYPGGAIMPTYDALYDAGLDHLLCRNEQGTAMAAIGYARSTGKVGVCIATSGPGATNLVIGLGDAMMDSIPVVAITGQVASSLIGTDAIEPWREQIRDLKAKLDFTYVENQGNRPIDPWALLNSLSNRKPNNAIXXXFHSLIN

SEQ ID NO: 1541 - DNA, 240 bp, Haemophilus influenzae
  misc_feature 222, 223, 224, 225, 226: n is any nucleotide
atggctcactcagccccaaaagcacaaaagcgtgagactttttctggtcgtcgcgcatttattctggcagcaattggttctgccgttggtcttggtaatatttggcgttttccttacaccacttatgaaaacggtggtggcgcatttattatcccttaccttattgcattattaaccgcaagggattcctcttttattcctagattatgcattgggcaccgnnnnncattcattcattaa

SEQ ID NO: 1542 - protein, 79 aa, Haemophilus influenzae
  VARIANT 75, 76: Xaa is any amino acid
MAHSAPKAQKRETFSGRRAFILAAIGSAVGLGNIWRFPYTTYENGGGAFIIPYLIALLTARDSSFIPRLCIGHRXXFIH

SEQ ID NO: 1543 - DNA, 669 bp, Haemophilus influenzae
atgacaggcgcacaactcattatggcgtgcttgaaagcacaccatgtcacgactcttttcggctatcctggtggcgcaattatgccaacctacgatgccctttatgacgcaggcttagatcacttactttgtcgtaatgaacaagggactgcaatggctgcgattggctatgctcgctccacgggaaaagtgggcgtctgtattgcaacatcaggccctggtgccactaatttagttattggattaggcgatgccatgatggactccattccagttgtcgccattactggtcaagttgcctcttcattaattggcacagatgctattgaaccttggcgtgagcaaatcagagatttaaaagcaaaattagatttcacttatgttgaaaatcaaggcaatcgcccgattgatccttgggcattactcaacagcctatctaatcgcaaaccaaataatgcgataatttgtactgatgtggggcagcataaaatgtggtcagtgcaacacattttacgcgtagcacgtcactgcggatttaccgttacaacaatggaaatgacactcattgaaacccaagtgcggttaaaaatcactgtaaaatctgaccgcactttagatctattagtgaatcagttggttaagctgccggatgttttaatggttaattaa

SEQ ID NO: 1544 - protein, 222 aa, Haemophilus influenzae
MTGAQLIMACLKAHHVTTLFGYPGGAIMPTYDALYDAGLDHLLCRNEQGTAMAAIGYARSTGKVGVCIATSGPGATNLVIGLGDAMMDSIPVVAITGQVASSLIGTDAIEPWREQIRDLKAKLDFTYVENQGNRPIDPWALLNSLSNRKPNNAIICTDVGQHKMWSVQHILRVARHCGFTVTTMEMTLIETQVRLKITVKSDRTLDLLVNQLVKLPDVLMVN

SEQ ID NO: 1545 - DNA, 1839 bp, Haemophilus influenzae
atgcccaaactacgttcagcgaccagcacacaaggtcgtaatatggcaggtgcacgtgccttatggcgtgcaacaggaatgaaagaaaatgactttggtaaaccgattattgcggtggtgaactctttcacgcaattcgtaccagggcatgtgcatttaaaagatatgggacagcttgttgccgcagaaatagaaaaagcgggcggcgtagcaaaagaatttaacaccattgctgtggatgatggtatcgcaatgggtcacggtggaatgctttattctttaccaagccgtgatttaatcgctgatagcgtggaatatatggtcaatgcgcactgtgctgatgcgatggtgtgtatttccaactgtgacaaaatcaccccaggaatgttaatggcggcaatgcgtttaaatattccaactatcttcgtttcaggcggcccgatggaagcaggtaaaactaaactttctgatcaattaatccgcttagatttagtagatgcgatgattgaggcagccgatccgaatgtatcagatgaacgtattgatgccatcgaacgcagtgcgtgtccaacttgtggttcatgttctggtatgtttaccgctaactcaatgaactgcttaactgaagccttaggtttatctttacctggtaatggttctatgttagccactcacgcagaccgtaaagaattattcttaaaagcaggtcgtcaaattgtcgagctttgcaaacgctattatgaacaagatgatgcaagcgtattgcctcgttcaatcggtacttttgatgcctttgaaaatgcaatgagcctcgatatcgcaatgggtggttcaagtaacactgttttacacttattagcggcagcacaagaagcaggcgtggattttaaaatggaagatattgaccgtttatcgcgcaaagtgccttgtttaagcaaaattgcaccaaacaccaataaatatcatatggaagacgtacaccgtgcaggcggtattatgggattgttgggggaattagatcgtgctggattaattcataaaaatacacacaccgtgcttggaatgagcatgggagagcaactagaccaatacgatattattcgcaatcaagatgaagaattacataaattcttccgtgcaggccctgcaggtatccgcacaactcaagcattctcacaagattgccgttgggataccgttgataatgatcgtgtaaacggttgtattcgcaacaaagaaaatgcaatttcgcaagaaggtggcttagccgtattattcggtaatctcgctgaagacggatgtatcgttaaaaccgctggtgtagatgaatctatttggaaattcactggcacggcaatcgtatttgaaagccaagaagatgcggttgcaggcattttaggtggcaaagtcaaagaaggtcatgttgttgttatctgttacgaagggcctaaaggcggaccaggtatgcaagaaatgttatacccaaccagttacttaaaatcgatgggcttgggcaaaaaatgcgctttattaacggatggtcgcttctctggcggtacatcaggcttgtctattggacatgcttcaccagaagctgcttctggcggtgcaattggcttagtacgcgatggcgatattatcaacattgatattccaaatcgtgcaattaacttagaaatcagtaatgatgaactcgcagcacgcagagccgaacaagatcaaaaaggttggcaaccagctaaccgtgaacgtgaagtctctttcgcattgaaagtattcggccactttgcgacctcagcggacaaaggtgcggtacgcgataaaacattattaaaataa

SEQ ID NO: 1546 - protein, 612 aa, Haemophilus influenzae
MPKLRSATSTQGRNMAGARALWRATGMKENDFGKPIIAVVNSFTQFVPGHVHLKDMGQLVAAEIEKAGGVAKEFNTIAVDDGIAMGHGGMLYSLPSRDLIADSVEYMVNAHCADAMVCISNCDKITPGMLMAAMRLNIPTIFVSGGPMEAGKTKLSDQLIRLDLVDAMIEAADPNVSDERIDAIERSACPTCGSCSGMFTANSMNCLTEALGLSLPGNGSMLATHADRKELFLKAGRQIVELCKRYYEQDDASVLPRSIGTFDAFENAMSLDIAMGGSSNTVLHLLAAAQEAGVDFKMEDIDRLSRKVPCLSKIAPNTNKYHMEDVHRAGGIMGLLGELDRAGLIHKNTHTVLGMSMGEQLDQYDIIRNQDEELHKFFRAGPAGIRTTQAFSQDCRWDTVDNDRVNGCIRNKENAISQEGGLAVLFGNLAEDGCIVKTAGVDESIWKFTGTAIVFESQEDAVAGILGGKVKEGHVVVICYEGPKGGPGMQEMLYPTSYLKSMGLGKKCALLTDGRFSGGTSGLSIGHASPEAASGGAIGLVRDGDIINIDIPNRAINLEISNDELAARRAEQDQKGWQPANREREVSFALKVFGHFATSADKGAVRDKTLLK

SEQ ID NO: 1547 - DNA, 1542 bp, Haemophilus influenzae
atgaaaaacttactcaccaatcctcaaccttctcaatcagattatatcaatgccattgttaaacttggttcgcgcgtatatgaagctgcacaagtgacccctttacaaaaaatgggaaaactttctgaacgactgcacaataatatctggatcaagcgcgaagatcgccaaccagtaaatagctttaaactacgcggcgcttacgcaatgatttctagcctttcagaggaacaaaaagcagcaggcgtaatagcggcatctgcaggtaaccatgcacaaggcgtggcattatcagcgaaacaattaggcttaaaagcattaattgttatgccacaaaacaccccaagcattaaagtggatgcagtgcgtggttttggtggtgaggtgttgttgcacggtgctaatttcgatgaagccaaagcaaaagccatcgagctttcaaaagaaaaaaacatgacatttattccaccattcgatcatccattagtgatcgctggacaaggcacgttagcgatggaaatgctacaacaagtggcagatttggattatgtctttgtacaagttggcggtggtggcttagctgcaggtgtggcaattttgcttaagcaatttatgccggaaattaaaatcatcggtgtagaatcaaaggattctgcatgcttaaaagccgctctcgataaaggcgaaccaacagatttaactcacgttggattatttgccgatggcgttgccgtaaaacgcattggcgacgaaacattccgtctatgtaaggaatatcttgacgatatggtattggtcgatagtgacgaagtgtgtgcagcaatgaaagatttgtttgagaacgttcgtgctgttgcagaaccatcaggtgcattaggtttggctggtttgaaaaaatatgtaaaacaaaaccatattgaaggcaaaaatatggcggcaattttgtctggcgcgaacttgaatttccacacattacgttatgtatctgaacgttgtgaaattggtgaaaatcgagaggctttattagccgtgaccatgcctgaacaaccaggtagtttcttaaaatttgcttatgtattaggtaacagagcagtaaccgaattcagttatcgttatgcagatgataaacgcgcttgtgtgtttgttggggtaagaacgacaaatgagcaagaaaaagcagatattattgcagacctcacgaaaaatggttttgatgttgaggatatgtctgatgatgatattgcgaaaacgcatgttcgctatttaatgggtggtcgtgcagccaatgataacgaacgcttatataccttcgaattcccagagcaaaaaggtgccttattaaaattcttggaaaccttgcaaaatcgttggaatatttcattattccactatcgtgcccacggcgcggactatggaaatatccttgctgggttccaaattgaagaacgcgaacaagcagaatttgaacaggcacttgcccaactcaattatgtttttgaagatgtaacagaaagcaaatcttatcgttatttcttacgttaa

SEQ ID NO: 1548 - protein, 513 aa, Haemophilus influenzae
MKNLLTNPQPSQSDYINAIVKLGSRVYEAAQVTPLQKMGKLSERLHNNIWIKREDRQPVNSFKLRGAYAMISSLSEEQKAAGVIAASAGNHAQGVALSAKQLGLKALIVMPQNTPSIKVDAVRGFGGEVLLHGANFDEAKAKAIELSKEKNMTFIPPFDHPLVIAGQGTLAMEMLQQVADLDYVFVQVGGGGLAAGVAILLKQFMPEIKIIGVESKDSACLKAALDKGEPTDLTHVGLFADGVAVKRIGDETFRLCKEYLDDMVLVDSDEVCAAMKDLFENVRAVAEPSGALGLAGLKKYVKQNHIEGKNMAAILSGANLNFHTLRYVSERCEIGENREALLAVTMPEQPGSFLKFAYVLGNRAVTEFSYRYADDKRACVFVGVRTTNEQEKADIIADLTKNGFDVEDMSDDDIAKTHVRYLMGGRAANDNERLYTFEFPEQKGALLKFLETLQNRWNISLFHYRAHGADYGNILAGFQIEEREQAEFEQALAQLNYVFEDVTESKSYRYFLR

SEQ ID NO: 1549 - DNA, 3363 bp, Haemophilus influenzae
atgggattaacggattttactaatttttgtggtgtggttagtttttatagcgaaatgctttcttcgggtatgaagcccattatcggggcagatgtaaaagtaaaaagcccattatgtggcgatgaatactttgatcttactttgctagctaaaaataatgaaggctatagaaatattactttattgttatcaaaggcttatcaacgcggttataacgatttaccttatattgatcaagattggttaattgaacatcgcgacggtgtgattattttatcagggggaacgcaaggcgatgtaggtaaaaaattgttgaaagaaaacgtagccgaaattgaaagtgcggtcgctttttaccaagaattttttgccgatcatttttatttagcattaagtcgtacaggtcgcccaaatgaagaacgttacattcaagcagcgttgaaattagcagaacgttgtgatttaccattggtcgcaactaatgatgtgatgtttttgaatgcagaggattttgaagcccacgaaattcgcgtagcgattcacgatggctatactttagacgatcctaaacgtccgaaatgttatacctcacagcaatattttcgtagtgaagaagatatgtgtaagctgtttgcagacattccttccgctctcgaaaataccttattaattgcgcaacgttgtagtgtaactttgcgccttggtcaatatttcttacctcaatttccaactggcgatttaagtacagaagatttcttagtgcaaaaatccaaagagggcttggaagaacgtttagtttttttattccctgatgaaaaagtgcggttagaaaaacgaccaaaatatgatgaacgcttgcaagttgagctagatgtaattaaccaaatggggttcccaggttatttcttgatcgtaatggaatttattcaatggtctaaggataacgatattccagtagggccaggtcgtggttctggtgcgggttcattagtggcttatgcattaaaaatcactgatttagatccgttagagtttgatttactatttgaacgtttcttaaatccagaacgtgtgtctatgcccgatttcgacgtggatttctgtatggatggtcgcgatcgcgtgattgaacacgttgctgaaacctatggtcgtggcgcggtatcacaaattattacctttggtacgatggcggcgaaagcggttattcgagatgtagggcgagtgctggggcatccttatggtttcgttgatcgtatttcgaaattgattcctcccgatccaggtatgacgcttgccaaagcgtttgaggccgagccgcaattacagactgcctacgatagcgatgaagaagtgcgagcattgattaacatggcgcgcaagctggaaggtgtgacacgtaatgcaggtaaacatgcaggtggcgtggtcatttcgccaaccttaattactgattttgcaccgctctattgtgataatgaaggcttacatccggttactcactttgataaaaatgatgtggaatatgcagggcttgtgaaatttgacttcctaggcttgcgtactctcactatcattaaatgggcattggatatgattaatgttcgtatggtgcgtgaaggcaagcctcgagtagatattgccgccattccacttgatgatcctgaatcttttgaattacttaaacgttccgaaaccaccgctgtgttccagttggaatcacgaggtatgaaagatttgatcaaacgcctgcaacctgactgttttgaagatattatcgcattggtagcattgttccgtccggggccgttacaatcgggtatggtagataactttatcgaccgtaaacacgggagagaagaagtatcttaccctgacgcagaatatcaacatgcaagtttgaaacctattcttgagccgacttacggcattattttgtatcaagaacaagtgatgcaaattgcgcaggtgttggctggctatacgctgggtggggctgacttattgcgtcgagcaatgggtaaaaagaaaccagaagaaatggcaaaacagcgtttagtgtttaaagagggggctgagaaaaacggtgttgatggcgagctatctatgaagattttcgacttggtggaaaaatttgctggctatggttttaataaatctcactctgctgcttatgccttggtgtcttaccaaactctttggctcaaaacccatttccctgcagaatttatggctgcagtgatgacatctgaaatagataatacggataaaatcgtaggtttgtacgacgaatgtttgcgtatgggcttaaaagtgatgccaccagatattaatatcggaaaacaccattttagtgttaatgaacaaggcgaaattgtgtatgggattggcgcgattaaaggcgtgggggaaggcccgattgaagcacttgtggcggcaagaaatgaaggggggattttcaaagatttattcgatttatgcgctcgtgtagatttgaaaaaaattaaccgccgtacttttgaaagcctaattatgtcgggtgcctttgataaattaggcccacatcgtgccgcactttctaagaatttggaagatgcacttagagcttccgatcagcatgcgaaagatgaagcaataggacaaacggatatgttcggtgtgctgactgaaacccatgaagacgtggaaaatgcctatgctaatacaccaccttacactgaaaaacaaattcttgatggcgaacgagaaaccttggggctttatttaagtagccatcctgttagccgttatttgaaagaactttctcattacacatcaacgcggttgaaagatctcgcaccaaatcgccgtggacaaattagcactgtggcgggattattggtcgcatcacgaattgcaatcacaaaaaaaggcaatcgcttaggcattgccacattagatgatcgttctggtcgcttagatttaacattatttggtgaaagtctagaacaatttggtgagaaattacaaaaagataccgttgttgttgcttctgggcaagtgagctttgatgatttctctggtggcttaaaaatgacggtgcgcgagttaatgaccttagatgaggcacgttctcgttatgtcaaatccttggctattagtctttctgagcatcaaattacaccaagtttcattaaacaatttaaagcattacttgagccagtgagtggtggaacattgcctattaacgtgtattatcaaagtccgaaaggtcgtgcgttgttacgtttaggcgtgcaatggtcgatcattccaacagatgaaattctgacggaattggtgaatttactcggcgaaagtgcggtggaattagagtttgaataa

SEQ ID NO: 1550 - protein, 1120 aa, Haemophilus influenzae
MGLTDFTNFCGVVSFYSEMLSSGMKPIIGADVKVKSPLCGDEYFDLTLLAKNNEGYRNITLLLSKAYQRGYNDLPYIDQDWLIEHRDGVIILSGGTQGDVGKKLLKENVAEIESAVAFYQEFFADHFYLALSRTGRPNEERYIQAALKLAERCDLPLVATNDVMFLNAEDFEAHEIRVAIHDGYTLDDPKRPKCYTSQQYFRSEEDMCKLFADIPSALENTLLIAQRCSVTLRLGQYFLPQFPTGDLSTEDFLVQKSKEGLEERLVFLFPDEKVRLEKRPKYDERLQVELDVINQMGFPGYFLIVMEFIQWSKDNDIPVGPGRGSGAGSLVAYALKITDLDPLEFDLLFERFLNPERVSMPDFDVDFCMDGRDRVIEHVAETYGRGAVSQIITFGTMAAKAVIRDVGRVLGHPYGFVDRISKLIPPDPGMTLAKAFEAEPQLQTAYDSDEEVRALINMARKLEGVTRNAGKHAGGVVISPTLITDFAPLYCDNEGLHPVTHFDKNDVEYAGLVKFDFLGLRTLTIIKWALDMINVRMVREGKPRVDIAAIPLDDPESFELLKRSETTAVFQLESRGMKDLIKRLQPDCFEDIIALVALFRPGPLQSGMVDNFIDRKHGREEVSYPDAEYQHASLKPILEPTYGIILYQEQVMQIAQVLAGYTLGGADLLRRAMGKKKPEEMAKQRLVFKEGAEKNGVDGELSMKIFDLVEKFAGYGFNKSHSAAYALVSYQTLWLKTHFPAEFMAAVMTSEIDNTDKIVGLYDECLRMGLKVMPPDINIGKHHFSVNEQGEIVYGIGAIKGVGEGPIEALVAARNEGGIFKDLFDLCARVDLKKINRRTFESLIMSGAFDKLGPHRAALSKNLEDALRASDQHAKDEAIGQTDMFGVLTETHEDVENAYANTPPYTEKQILDGERETLGLYLSSHPVSRYLKELSHYTSTRLKDLAPNRRGQISTVAGLLVASRIAITKKGNRLGIATLDDRSGRLDLTLFGESLEQFGEKLQKDTVVVASGQVSFDDFSGGLKMTVRELMTLDEARSRYVKSLAISLSEHQITPSFIKQFKALLEPVSGGTLPINVYYQSPKGRALLRLGVQWSIIPTDEILTELVNLLGESAVELEFE

SEQ ID NO: 1551 - DNA, 93 bp, Haemophilus influenzae
gtgtgcgaagatggacgaagcgaggttgggatgacattgaaaatccttaaagtgcggttaaattttgccgtaaatattaaagcggtattatag

SEQ ID NO: 1552 - protein, 30 aa, Haemophilus influenzae
MCEDGRSEVGMTLKILKVRLNFAVNIKAVL

SEQ ID NO: 1553 - DNA, 1653 bp, Haemophilus influenzae
atgacaacactttttgaggttgcacaacattggttaaaccaagatcctgacacagaaactcgtgcagaattaaccgcacttttagatgcagcaaaaggcggagataaagcggcagaagcagaattacatgcgcgttttgatggtcgtttacaatttggtacggcaggtttacgtggtcgtttacaagctggctcaatagggatgaaccgagttttagtttctcaagctgctggtggtttagcggaatatttaaaaggttacgataaagaaccctcaatcgtcattggttacgatggccgtaaaaactctgacgtttttgcccgtgacaccgctgaaattatggcgggtgcaggcgtaaaagcttatttattaccacgcaaattaccgactccagttttagcctatgctatccaatattttgataccactgcaggtgtaatggtaacagcaagccataacccaccagaagataatggctacaaagtgtatttaggtaaagcaaatggtggcggtcaaatcgtttcaccggcagataaagacatcgcagcattaattgataaagttgcggctggcaatatccaagatttaccacgtagcgataattatgtggtgttaaatgatgaagtggtagatgcgtacattacaaaaactgcatcattagctaaagaacccgcttgcgacattaactatgtttataccgctatgcatggtgtgggctatgaagttttaagtaaaacactggcaaaagcaggcttaccacaaccccacgtagtagcagatcaagtttggccagatggcacattcccaacggtgaacttcccaaatccagaagaaaaaggcgcattggatttagcaattaaagtggcaaaagaaaagaatgctgaatttatcattgctaatgacccagatgcagaccgtttagccgttgctgtgcctgatgcgcaaggtaactggaaatcactacacggtaacgtggttggctgtttcttaggttggtacttagcaaaacaatatcaaggtaaacaaggcacattggcttgctcacttgtttcttctcctgcactcgctgaaattgcgaaaaaatacggtttccaatcagaagaaaccttaactggtttcaaatacatcggtaaagtatctggcttattgttcggttttgaagaggcattgggctatctagtggacccagacaaagtacgcgataaagacggtatttctgcagcaatcgtgttcttagatcttgtgcgtaacttgaaaaaacaaggcaaaactttagcagattatgctgatgaatttaccaaagaatttggtgcttatgtgagtggacaaatctctattcgagtcagcgatctttcagaaatcggaaaattaatgaccgcacttcgtaacaatccaccagcagaaatcgctggcgtgaaagtggcacaatttatcgaccatactaaaacggatcgtcaaagcgatatccttgtatttaacttggaaaatggcggacgcttaattgctcgtccttcaggtactgaaccaaaaattaaattctacttggatgcgcgcggtaaagatccaaaagatgcagatcgcgtattggcagaatttgatgaaggtgtttgtcacattcttcgccaagatgcttatggcaaacaagactgctaa

SEQ ID NO: 1554 - protein, 550 aa, Haemophilus influenzae
MTTLFEVAQHWLNQDPDTETRAELTALLDAAKGGDKAAEAELHARFDGRLQFGTAGLRGRLQAGSIGMNRVLVSQAAGGLAEYLKGYDKEPSIVIGYDGRKNSDVFARDTAEIMAGAGVKAYLLPRKLPTPVLAYAIQYFDTTAGVMVTASHNPPEDNGYKVYLGKANGGGQIVSPADKDIAALIDKVAAGNIQDLPRSDNYVVLNDEVVDAYITKTASLAKEPACDINYVYTAMHGVGYEVLSKTLAKAGLPQPHVVADQVWPDGTFPTVNFPNPEEKGALDLAIKVAKEKNAEFIIANDPDADRLAVAVPDAQGNWKSLHGNVVGCFLGWYLAKQYQGKQGTLACSLVSSPALAEIAKKYGFQSEETLTGFKYIGKVSGLLFGFEEALGYLVDPDKVRDKDGISAAIVFLDLVRNLKKQGKTLADYADEFTKEFGAYVSGQISIRVSDLSEIGKLMTALRNNPPAEIAGVKVAQFIDHTKTDRQSDILVFNLENGGRLIARPSGTEPKIKFYLDARGKDPKDADRVLAEFDEGVCHILRQDAYGKQDC

SEQ ID NO: 1555 - DNA, 510 bp, Haemophilus influenzae
atgtcagaacaaaaacaagacgttgcagcaacagaagaacaacaacccgttctccaaattcaacgtatttatgtgaaagatgtgtcttttgaagctccaaatcttccacatattttccaacaagaatggaaaccaaaacttggttttgatttaagcaccgaaacaacccaagttggcgatgacttatatgaagtggtattaaacatttctgttgaaactacacttgaagatagtggcgatgtcgcatttatttgcgaagtaaaacaagcgggcgtatttactattagcggtttagaagatgttcaaatggcgcattgtttaacttctcaatgcccgaatatgcttttcccttatgcgcgtgaattagtgtctaacctagtaaatcgcggtacgttccctgcattaaacttatctccagtaaactttgatgcattgtttgttgaatatatgaatcgccaacaagcagaaaatgcagaagaaaaatctgaggaagaacaaactaaacattaa

SEQ ID NO: 1556 - protein, 169 aa, Haemophilus influenzae
MSEQKQDVAATEEQQPVLQIQRIYVKDVSFEAPNLPHIFQQEWKPKLGFDLSTETTQVGDDLYEVVLNISVETTLEDSGDVAFICEVKQAGVFTISGLEDVQMAHCLTSQCPNMLFPYARELVSNLVNRGTFPALNLSPVNFDALFVEYMNRQQAENAEEKSEEEQTKH

SEQ ID NO: 1557 - DNA, 447 bp, Haemophilus influenzae
atgcaagaatttatctcaatggcaacagagtttgctcaaaaacatacgcttttagcggtttcttggtttgcgattttcgtgatggtgatttataccttctacaaaggcgcaacgaataaatttaaagtaattacgcacaatgaagttattcggttaataaattccgatgaagccattgtggtagatttacgtagtcttgaagaatttcaacgtggacatatcattaatagtattaatgtgcttccaagcgaaattaaaaatcaaaatatcggaaaattagagtcgtataaagagaaagctcttatattagtcgatacaaatggtacttcagcctctgcttctgcagtatttttaaccaaacaaggttttaattctgtatttgtgttgaaagaaggcctttccgcgtgggtagcagcaaatttacctttagttaaaaaacataaataa

SEQ ID NO: 1558 - protein, 148 aa, Haemophilus influenzae
MQEFISMATEFAQKHTLLAVSWFAIFVMVIYTFYKGATNKFKVITHNEVIRLINSDEAIVVDLRSLEEFQRGHIINSINVLPSEIKNQNIGKLESYKEKALILVDTNGTSASASAVFLTKQGFNSVFVLKEGLSAWVAANLPLVKKHK

SEQ ID NO: 1559 - DNA, 228 bp, Haemophilus influenzae
  misc_feature 201, 202, 203, 204, 205: n is any nucleotide
atgaaattaactaaattagccttatgtactttatttggtctaggtgtttcaatagcaaatgcagctgacttaccaaatattacaatcttggcaacgggtggtaccattgcaggaagcgggcaaagttcggtaaattctgcgtataaagctggacaattaagtattgatactttaattgaagctgtaccagaaatgaaaaannnnncattccattcattaattaattaa

SEQ ID NO: 1560 - protein, 75 aa, Haemophilus influenzae
  VARIANT 67, 68, 69: Xaa is any amino acid
MKLTKLALCTLFGLGVSIANAADLPNITILATGGTIAGSGQSSVNSAYKAGQLSIDTLIEAVPEMKXXXFHSLIN

SEQ ID NO: 1561 - DNA, 831 bp, Haemophilus influenzae
  misc_feature 8, 9, 10, 11, 12: n is any nucleotide
atgaatgnnnnnaaaataggttcacaagacatgaatgacgaagtctggctaaaactggcaaaagccatcaatgctcaatgtaaaagtactgatggatttgtcattacccatggtacagataccatggaagagacggcttatttcttagatttaaccgtaaaatgtgaaaaacctgttgttctcgttggggcaatgcgtcctgcaacagaaaaaagtgctgatggcccattaaatctttacaatgctgtcgttgtcgcagcagacaaaaaatcaagtggtcgtggtgttttagtcgcaatgaataatgaagtactaggtgctcgcgatgtaacaaaaaccagtactaccgcagtgcaaacgttccattcaccaaattatggttctctaggctatattcataacagcaaagtggactatgaacgttccccagaaagcaaacataccatcaacactccgtttaacgtagaaaaattagatagcctacccaaagtggggattatttatgcttattcaaatgcacctgtcgaaccattaaacgcattactcaatgctggctatcaagggattgtatctgcaggagttggcaatggaaatgttaatgccgcacacttagatcgcttagaaaaagccgcaaaagatggcgtcgttgtagtccgttcttctcgtgtaccaacgggttatacaactcgtgacgctgaagttgatgatagtaaatatggctttgtagcatcaggtactttaaatccacagaaagcccgcgtgctcttgcaattagctttaactcaaactaaagatccaaaagtaattcaacaatatttcgaagacttctaa

SEQ ID NO: 1562 - protein, 276 aa, Haemophilus influenzae
  VARIANT 3, 4: Xaa is any amino acid
MNXXKIGSQDMNDEVWLKLAKAINAQCKSTDGFVITHGTDTMEETAYFLDLTVKCEKPVVLVGAMRPATEKSADGPLNLYNAVVVAADKKSSGRGVLVAMNNEVLGARDVTKTSTTAVQTFHSPNYGSLGYIHNSKVDYERSPESKHTINTPFNVEKLDSLPKVGIIYAYSNAPVEPLNALLNAGYQGIVSAGVGNGNVNAAHLDRLEKAAKDGVVVVRSSRVPTGYTTRDAEVDDSKYGFVASGTLNPQKARVLLQLALTQTKDPKVIQQYFEDF

SEQ ID NO: 1563 - DNA, 1323 bp, Haemophilus influenzae
atgtctgcaatgtttttactacaatttgccatcgtattattgtgtatctttgtgggtgcgcgtgtaggtggtatcggtttaggtgtatttggtggtttaggtcttgccattctttcttttggctttggcttgaaaccagcaggtttacctattgatgttatgtttatgattatggctgtagtggcagccgcggcagcaatgcaagcagctggcggtttagactacatgatcaaaatcgcaaccaaaatcttacgtcgtaatcctaaacacattacgtttattgcgccagcagtaacttggttattcactctcttagcgggtactggtcacgtggcatattctgtattgccagttatcgctgaagtgagccgtcaaaacggtatccgtcctgaacgcccaatgtcaatggcggtaattgcatcacaatttgctatcgtagcaagcccaatcgctgcagcggtggtggctgtggttgcttaccttgagccacaaggcattcatcttggcgatgttttaatggtaaccattccttcaactattctaggacttttccttgcttgcttatttgttaataaaatgggtaaagaattaaaagatgatccagaatatcaacgtcgtttgaatgatccaaaatatgcagatatttttgcttctaccacttcagtcaaagaagtagaagtgagcaaaacagctaaaatttccgtttctttattcttatttggtgctttacttgtcgtgttaatgggtgcagctccttctattcgacctgtttttgatggaaaaccaatgggaatggcacataccattgaaattattatgctttctattggtgcattgattatcttaacttgtaaaccagatggcacagcgattaccaaaggttctgtattccatgcaggtatgcgcgcagtaatcgcaatcttcggtattgcttggttaggtgacactttaatgcaggcacacattactgaagtaaaagaaatggtgaaaggcttagtggaaactgcaccatgggcatttgctttcgcgctatttgtactttctgtattagtaaacagccaaggtgcaacagtagcgacattgttccctcttggtatcgcattaggtatccccgcacctgtattaatcggtgtatttgttgctgtaaatggttacttcttcatccctaactatggtccaatcattgcatctcttgacttcgataccacaggtacaaccaaaatcggtaaatacattttaaaccacagctttatgcttccgggtttattgagcatgtttttctgcttattaatcggtttaggtctttcgcacgttattctttaa

SEQ ID NO: 1564 - protein, 440 aa, Haemophilus influenzae
MSAMFLLQFAIVLLCIFVGARVGGIGLGVFGGLGLAILSFGFGLKPAGLPIDVMFMIMAVVAAAAAMQAAGGLDYMIKIATKILRRNPKHITFIAPAVTWLFTLLAGTGHVAYSVLPVIAEVSRQNGIRPERPMSMAVIASQFAIVASPIAAAVVAVVAYLEPQGIHLGDVLMVTIPSTILGLFLACLFVNKMGKELKDDPEYQRRLNDPKYADIFASTTSVKEVEVSKTAKISVSLFLFGALLVVLMGAAPSIRPVFDGKPMGMAHTIEIIMLSIGALIILTCKPDGTAITKGSVFHAGMRAVIAIFGIAWLGDTLMQAHITEVKEMVKGLVETAPWAFAFALFVLSVLVNSQGATVATLFPLGIALGIPAPVLIGVFVAVNGYFFIPNYGPIIASLDFDTTGTTKIGKYILNHSFMLPGLLSMFFCLLIGLGLSHVIL

SEQ ID NO: 1565 - DNA, 1335 bp, Haemophilus influenzae
atgaaaaacgtcgtgatcgttggtgggggtgctggcggtattgaattagcaacatttttgggtaataaattaggtcgtcaaaaacaagctaaagtaacgctggttgatcgcaatgccacccatttatggaaacccttattgcatgaaattgcaacaggtgtaatggatgatggcgttgattctttaagttatcgtgcgcacggtaaaaatcattttttcagttttgagcaaggttcaattatacgtattaatcgcgagcaaaaatatgttgaacttgcacctgtttatggacaagagggcgatatgcttgtcattgctcgtcgaattccttacgattatttagtgattgccattggcagtaaatctaatgatttcaacacaaaaggggtggctgataattgtatttttttagatagttcaaaacaggctttacgttttcaacataaactgttggaattatttttaaaattttcagaaaaccgcgcattagatgacattggcgaagaagaatttaaacaaaagttagtggatgaaaataaagtaaatattgctattgtgggaggtggagcaactggtgtggaattaaccgcagaactttatcatgccgctgaagatttgtcttcttacggttatggtaaaattgatagttcttgcttacaagttactttagtcgaagcaggaacacgtttattgccagcattacctgaaaatttatctgctgctgtgttagatgaattaaaggaaatgggtgccaatgtgcaattaaacacaatgattactgaggcacaaccaaatacacttattaccaaagatggcggggagattaaagctgatcttattgtttgggcagcaggggttcgcgtctcaacagtaacgcagcaatttgatggattagaaattaatcgtatcaatcaattagtggttaaagatacacttcaaactaccgttgatgatagtatttttgcgattggcgattgtgctgcatttatacaatcaaatggtaaattggttccgccaagagcgcaagctgcacatcaaatggcaaaggcttgtgcaaaaaatatttttgcattgtttgaaaataaaccactgaaatcttttaaatataacgataaaggtactttagtttctctgtcaaattttaccgcacttggtagtctaaccaataagtttggtaaaaatccacttaccgttcaaggtaaatttgcgcagtttgcttatgtatctttgtatcgaatgcaccaacatgctttgcacggttgtattaaaattggtttgattattctcgttgataaattgaatcgttatttaaaaccaagattaaaattgcattga

SEQ ID NO: 1566 - protein, 444 aa, Haemophilus influenzae
MKNVVIVGGGAGGIELATFLGNKLGRQKQAKVTLVDRNATHLWKPLLHEIATGVMDDGVDSLSYRAHGKNHFFSFEQGSIIRINREQKYVELAPVYGQEGDMLVIARRIPYDYLVIAIGSKSNDFNTKGVADNCIFLDSSKQALRFQHKLLELFLKFSENRALDDIGEEEFKQKLVDENKVNIAIVGGGATGVELTAELYHAAEDLSSYGYGKIDSSCLQVTLVEAGTRLLPALPENLSAAVLDELKEMGANVQLNTMITEAQPNTLITKDGGEIKADLIVWAAGVRVSTVTQQFDGLEINRINQLVVKDTLQTTVDDSIFAIGDCAAFIQSNGKLVPPRAQAAHQMAKACAKNIFALFENKPLKSFKYNDKGTLVSLSNFTALGSLTNKFGKNPLTVQGKFAQFAYVSLYRMHQHALHGCIKIGLIILVDKLNRYLKPRLKLH

SEQ ID NO: 1567 - DNA, 2433 bp, Haemophilus influenzae
atggcaaattttataaatatgtatcgccaattattgagcttgccgctgtctgcattggtgaaaaataatcctattcccgccaatccaatagaagagctttcacttaatattcatcaacctattgtttatgttttgccttatacatctcaaactgatttcgttattttccgccgaaattgcttagcgttaggcttgcccgatcccgcagagaaaaatgaaattaatggcgttaagttaccacgttatgtatatttagacgaaggtcgccgaatttttaaatcaaaaggtgcaaaagacgaaaccactaccattttcaataaatatcttgaattacaccgcacttctgaaagtttagatgtgcaacttattcctgtttctgttctttggggacgttctcccggacaagaagataaatcagatttgcctaatttgcgtttattaaatggtatacaaaaaacatttgcagcaatttggtttggacgtgatacttttgtgcgtttttctcaagcggtttcattacgttatatggtagttgaacatggctcagatgaaaaaattgcacaaaagctggctcgagttgcaaaaatgcacttcgcaaaacaacgtatttcagcgacaggccctcgtttaccaaatcgtcaagcaatgtttaataaattattgcaatcagaagcaatccgacgagcaattgaagatgaagcaaaatcaaaaaatatcagtattgaaaaagcacaaaaagaagcatataaaattttggatgaaattgcagctgatgtcagccattcaagtttacgtgcagtagatcgttttttacgttggctttggaataaactttattcaggtattgatgtacaaaattcgaatcgtgtccgtaaattagcgttagaaggtcatgaaattgtttatgtgccttgccaccgtagtcatatcgattacttattgctttcttatgtgctttatcatcaaggtcttgttccgccacatatcgcggcagggattaacttaaatttctggcctataggtagaatgtttcgtagttggggggcattctttattcgccgtacttttaagggaaatcgactatattctgccatttttcgcgaatatttatcagaactattccatcgaggctattccgtcgaatattttattgagggcggtcgttctcgtacaggtcgtttgctggcaccaaaaacaggtatgatgtcaatgacacttcaagcattacaacatagtcaaactcgcccaatttcgattgttcctgtttacgttggttatgaacacgtattagaagtagacacttatgcaaaggaattacgtggtgcagcgaaagaaaaagaaaatgcgggtttagtacttcgtgtaattaaaaaattacgtaatcttggtcaaggttttgtaaattttggtgagccaattacgctttcaaactatttgagccaacatttccctgattggaaagagcaaaatcacgaagaaaaaccacaatggtttacacctgcggtaaataatatttctaaacaagtaatgattaatattaacaaagcagcggcagttaattcaatgaaccttgtgggtacagcactactttcatctcgtcagcgagcactttcacgtgagcaactgttagaacaacttagtagttatcaacaattgttacaaaatgtcccttattctacggacgtagtgctaccaaatgtgacaccgcaagcaatgttagaacacgtattagctttagatcgtataggtgtgttaattgaaaaagataattttggcgaaattgtacgcttagaacgttcatctgctgtactaatgacttattatcgtaataatattcagcatctattcgtattaccatctttagttgcgagtattattttgcattacgaagcgatccaaaaagatttattattagacgcgattagaaaaatttaccctttcttacaaggcgaattgttcttacatttcaatgaagatgaattgaatgtacaaatccatcaaatcattaatgaatttgcacgccaaatcgttattaattcaaatgataacttcttatctattaataaatcaaaagtacgaattttacagctttggtctgcgggaacgcgggaaatcttgcaacgttattacattactgtcactattttacaaaaacaacctgctatttctcgagctgaacttgaaaaagaaagccagcttgttgctcaacgtttatcagtattacacggcataaatgcaccagaattctttgataaagcggttttttcaagctttattgcaaacttgaaagagcaacgttactttgatgaatctggttatactgttcttgataaaatagaagaattagcttcaacgctttcccatttgatttcaacagaaatttgcttaacggtgaaaggaacaattgaaaaatccgaagatctttcttcataa

SEQ ID NO: 1568 - protein, 810 aa, Haemophilus influenzae
MANFINMYRQLLSLPLSALVKNNPIPANPIEELSLNIHQPIVYVLPYTSQTDFVIFRRNCLALGLPDPAEKNEINGVKLPRYVYLDEGRRIFKSKGAKDETTTIFNKYLELHRTSESLDVQLIPVSVLWGRSPGQEDKSDLPNLRLLNGIQKTFAAIWFGRDTFVRFSQAVSLRYMVVEHGSDEKIAQKLARVAKMHFAKQRISATGPRLPNRQAMFNKLLQSEAIRRAIEDEAKSKNISIEKAQKEAYKILDEIAADVSHSSLRAVDRFLRWLWNKLYSGIDVQNSNRVRKLALEGHEIVYVPCHRSHIDYLLLSYVLYHQGLVPPHIAAGINLNFWPIGRMFRSWGAFFIRRTFKGNRLYSAIFREYLSELFHRGYSVEYFIEGGRSRTGRLLAPKTGMMSMTLQALQHSQTRPISIVPVYVGYEHVLEVDTYAKELRGAAKEKENAGLVLRVIKKLRNLGQGFVNFGEPITLSNYLSQHFPDWKEQNHEEKPQWFTPAVNNISKQVMININKAAAVNSMNLVGTALLSSRQRALSREQLLEQLSSYQQLLQNVPYSTDVVLPNVTPQAMLEHVLALDRIGVLIEKDNFGEIVRLERSSAVLMTYYRNNIQHLFVLPSLVASIILHYEAIQKDLLLDAIRKIYPFLQGELFLHFNEDELNVQIHQIINEFARQIVINSNDNFLSINKSKVRILQLWSAGTREILQRYYITVTILQKQPAISRAELEKESQLVAQRLSVLHGINAPEFFDKAVFSSFIANLKEQRYFDESGYTVLDKIEELASTLSHLISTEICLTVKGTIEKSEDLSS

SEQ ID NO: 1569 - DNA, 624 bp, Haemophilus influenzae
atgagaccattaaccgcacgccaacaagaagtgttggatttattaaaacgccatttggaaacaacaggtatgccaccaacacgagcagaaatatctcgagaattaggtttcaaatctgcaaatgccgcagaagaacatttgaaagcactttcacgtaaaggtgcaatcgaaatcattcccggcgcatctcgtggtattcgtattttagacaatagttcgaatgatgaatttgacggtttaccgcttgtagggcgcgtggctgctggagaaccgattcttgcagagcagcatattgaagcgacatatcgagtagatgcagatatgtttaaaccacaggctgatttcttacttaaagtttatggtctatcaatgaaaaatgttggtatcttagatggtgatttattagctgtgcatagtactaaggatgtacgtaacggacaaattgtggttgcacgtattgaagatgaagtaacagtaaaacgtcttgagaaaaaaggttctatcatttatctacacgcagaaaatgaagaatttgatcctatagtagtcaatcttgaagaacaaaaaaattttgaaattgaaggtattgcagtaggcattattcgtaataacgcttggatgtaa

SEQ ID NO: 1570 - protein, 207 aa, Haemophilus influenzae
MRPLTARQQEVLDLLKRHLETTGMPPTRAEISRELGFKSANAAEEHLKALSRKGAIEIIPGASRGIRILDNSSNDEFDGLPLVGRVAAGEPILAEQHIEATYRVDADMFKPQADFLLKVYGLSMKNVGILDGDLLAVHSTKDVRNGQIVVARIEDEVTVKRLEKKGSIIYLHAENEEFDPIVVNLEEQKNFEIEGIAVGIIRNNAWM

SEQ ID NO: 1571 - DNA, 825 bp, Haemophilus influenzae
atgcagttttccaaaatgcacggattaggtaacgattttgttgtggttgatggagtcactcaaaatgtgttttttactccagaaacgatccgacgtttagccaatcgccattgtggaattgggtttgatcaacttttaattgttgaagctccttacgatcccgaactcgactttcattatagaatttttaatgctgatggaagcgaagtttcgcaatgcggaaatggtgctcgttgttttgctcggtttgtgacattaaaagggctaactaacaaaaacgacatctcggttagcacacaaaagggtaatatggttttgacggtaaaagatgacaatcaaattcgtgtgaatatgggcgaaccaatttgggaaccagcaaaaattccatttaccgcaaataaatttgagaaaaattatattctgcgtacagatattcaaaccgtactatgtggtgcagtttcaatggggaatcctcattgtgttgtacaagtagatgatattcaaacagcaaatgttgaacagcttggtcctttgttagaaagccacgaacgttttcctgagcgtgtcaatgctggttttatgcaaatcatcaacaaagaacatattaagcttagagtttatgaacgtggtgctggcgaaactcaagcctgtggaagtggtgcttgtgcagctgttgcagttggaattatgcaaggcttattaaacaacaatgtccaagtagatttactgggcggttcgctcatgatcgaatggaatggtgttggtcatccactttatatgacaggcgaggcgacccatatttatgatgggtttataactctttaa

SEQ ID NO: 1572 - protein, 274 aa, Haemophilus influenzae
MQFSKMHGLGNDFVVVDGVTQNVFFTPETIRRLANRHCGIGFDQLLIVEAPYDPELDFHYRIFNADGSEVSQCGNGARCFARFVTLKGLTNKNDISVSTQKGNMVLTVKDDNQIRVNMGEPIWEPAKIPFTANKFEKNYILRTDIQTVLCGAVSMGNPHCVVQVDDIQTANVEQLGPLLESHERFPERVNAGFMQIINKEHIKLRVYERGAGETQACGSGACAAVAVGIMQGLLNNNVQVDLLGGSLMIEWNGVGHPLYMTGEATHIYDGFITL

SEQ ID NO: 1573 - DNA, 498 bp, Haemophilus influenzae
atgacagttacattagcaggaaaccctattgaagttggcggacatttccctcaagtaggcgaaatagtagaaaactttattttagtcggtaatgatttagccgatgttgcattaaacgattttgcaggtaaacgcaaggtcctaaatatttttccaagcatcgacacaggtgtatgtgcgacttcagtacataaatttaaccaacaagcggcaaaattaagtaatactgttgtgctttgtatttcagcagacttgccctttgctcaagctcgtttttgtggagcagaagggattgaaaatgccaaaacagtttcaacttttcgtaaccatgcattacactcacaattaggcgtagatattcaaactggcccgttggcaggtttaacttctcgtgcggttattgtgttagatgaacaaaacaatgttttacacagccagttagttgaagaaattaaagaagagccaaactatgaagctgcattggcagtgttagcgtag

SEQ ID NO: 1574 - protein, 165 aa, Haemophilus influenzae
MTVTLAGNPIEVGGHFPQVGEIVENFILVGNDLADVALNDFAGKRKVLNIFPSIDTGVCATSVHKFNQQAAKLSNTVVLCISADLPFAQARFCGAEGIENAKTVSTFRNHALHSQLGVDIQTGPLAGLTSRAVIVLDEQNNVLHSQLVEEIKEEPNYEAALAVLA

SEQ ID NO: 1575 - DNA, 3894 bp, Haemophilus influenzae
atgactgtcaaaacctttcgtggctcgcctgctctttctgaatttcgtttaactcaacttcaacaaaaatgccagcaatatcaattgcctattaggtcagtttatgcagagtatttgcattttgttgaacaaaaaacatcgcttgtagaagatgaaatcgttaaattacaagcattattgcattatggatcaatgttttctgaactcaagcctgcaggatattgtttaattgtgactccacgagtggggacaatttcctcttggtcttcaaaagcgacagacatcgctcacaattgtggtttgtcgaaggtaaatcgtattgaacgcggtatagcctattacttcaatattgagcgtgatttaaccgaagcagaattggctacgctgaaagatttattacacgaccgtatgttagaaaccgtgttaaatcacgaaacagaagtagccttgctttttactcaacaagaacccaaagcattaactaccattgatattttaaatggtggccgtcaagcattagaacaggcgaatattgccttgggtttagcgttggcagatgatgagatggattatttagtggaaagttttactgccttaaagcgtaatccacaggatgtggagctttatatgtttgcacaagcgaattcagagcattgtcgccataaaatttttaatgccgattggattattgatggcaaaaaacaggataaatcgctgtttaaaatgatcaaaaatacctttgagcaaacgcctgattttgtgctttctgcttataaagataatgctgcagtaatggaaggttcgaaagtcgggcgttggtttcctgatcctgatggacaatatcgtgttcatcaagaagatgcgcacattttaatgaaagtggaaacgcataaccatcccacagcaatttcgccatttcctggtgctgcaacaggctctggcggggagattcgtgatgaaggggcaacggggcgtggggcaaaacccaaagcaggtttaacaggtttctcggtgtctaacctcgttattccaaactttgaacaaccttgggaaaatccattgtctaaaccaaatcgcattgcttctgccttagatattatgatagatgcgcctttaggtagtgcggcatttaataatgaatttggtcgcccagcattattaggttatttccgtacttatgaagaaaaagtaaatagttttgcaggaaaagaagtacgtggttatcacaagccgattatgttagcgggaggaatcggtaatattcgtggcgaacaggttcaaaaaggcgaaattccaatcggtgctaaattgatcgttttgggtggggcagcaatgaacatcggtttaggtggtggtgcagcttcttcgatggacagtggtaaatcaaaagaagatttagattttgcttctgttcaacgtgaaaatccagaaatggaacgccgctgccaagaagttattgaccgctgttggcaattaggcgaagaaaatccaatcttgtttattcacgatgtgggtgcgggtggtttatctaatgcaatgcctgaattggtacacgatggcaagcgtggaggaaaattcgatctgcgttctattctttgtgatgaaaaaggtatgtcgccattggaaatttggtgtaatgaatcgcaagaacgttatgtattagccgttgcgccagaaaacctcgaattatttaccgcactttgtaagcgtgaacgtaccccttttgcagtgattggcgaagcaacacaagcagaacatttaatcttgcacgatagtcatttcgataataatccaattgatttaccaatgaatgtgttattaggtaaaacgccgaaaatgacgcgtgaagttttgtcaaaaacagtagaaaatcaatcacttaaaacagaaggtattcaattaaaagaagcattccatcgtgtattacgtttacccgttgttgcagaaaaaactttcttaattactattggtgatcgctcggtaacaggaatggtagcccgagatcaaatggtggggccttggcaaatccccgtgtctgatgtggctgttactactgcttcactggatagctaccacggcgaagcaatggcaatgggcgaacgttctccagttgccttgctagatttctcggcttcggcacgtttagctgtggcggaggccattactaacattgctggcaccctaattggcgagatgaaacgtattaaactttccgccaactggatgagtgcagcaggtcacacaggcgaagatgcgggactttatgaagcagtaaaagctgtgggcgaagaactttgtcctgcgttaggcttaactattcctgtgggtaaagactcaatgtcgatgaaaaccacttggatcgataatggcgaacaaaaatcagtgactgccccactttcattagtaatttccgcttttgctcgtgtagaagatgtacgtaaaacgcttacgccacaacttcgtaccgacaaaggtctctcgagtttattgctaattgatttaggcgaagggcataatcgattaggtgcgaccgcacttgctcaagtgtacaaacagttaggagacaagcctgccgatgtggtaaaggttcaacgcttaaaagatttttacaatgcaatgcaaactttagtggcagaagataaattattggcttatcacgaccgttcggacggcggtttaatcacaactcttgcagaaatggcgtttgcagggcattgtggggtagaagttgatatttcagctttaggcgacaacgatttagcggtattatttaacgaagaattgggagcggttatccaagttgccgatagccaattagaaagcgtacgtgaggtgttgaaagctcacaatttgcttggtattactcaccaacttggtacggtaactgttgatgatcgctttgagatcagccgcggcagccataaattattcagcgaaaaacgctctgaattacgtagtatttgggcagaattaacttaccaaatgcaacgcttacgcgataatccagagtgtgctgagcaagagtttgaagctaagaaaaaccctgacgacaaaggcttatccgcatttttgacttacgatgtgaatgaagatattactgcgccatttatcaataaaggtgtaaaaccaaccattgcaattttacgtgaacaaggtgtaaatagtcattatgaaatggcagcagcgtttgatcgagcaggctttaatgcaattgacgtgcatatgtctgatttaatgattggtcgtcgtaatttagccgaattcaatgcaatggttgcttgtggcggtttctcttacggcgatgtgcttggtgcagggggcggttgggcaaaatccatcttatttaacccgaaattacacgagcaattcagccagttttttatcaatccaaatacactgaccttaggcgtatgtaacggttgtcaaatgatctctaacttggcggaaattatcccaggtacagaaaactggccgcattttgtacgcaacaaatctgaacgctttgaagcgcgtgtgagtttagtgaaaattaatgaagtggattcagtttggtttgcaggaatggcaggctcacatatgcccattgcggtttctcacggggaaggacaagttaagtttaaatcagttgaacagtttgcaggcttaaaagcacaaggcatcattgccgcacaatatattgacaacaacggtagccccaccgaactatatcctgccaatccgaatggttcttcggagggcattactgcaattacaaatcttgatgggcgagttgctattatgatgccacaccctgaacgtgtgttccgtgctgtgagtaactcttggcacccagaaaactggacagaagacggtgcgtggatgagattattcagaaatgcaagaatggtattttag

SEQ ID NO: 1576 - protein, 1297 aa, Haemophilus influenzae
MTVKTFRGSPALSEFRLTQLQQKCQQYQLPIRSVYAEYLHFVEQKTSLVEDEIVKLQALLHYGSMFSELKPAGYCLIVTPRVGTISSWSSKATDIAHNCGLSKVNRIERGIAYYFNIERDLTEAELATLKDLLHDRMLETVLNHETEVALLFTQQEPKALTTIDILNGGRQALEQANIALGLALADDEMDYLVESFTALKRNPQDVELYMFAQANSEHCRHKIFNADWIIDGKKQDKSLFKMIKNTFEQTPDFVLSAYKDNAAVMEGSKVGRWFPDPDGQYRVHQEDAHILMKVETHNHPTAISPFPGAATGSGGEIRDEGATGRGAKPKAGLTGFSVSNLVIPNFEQPWENPLSKPNRIASALDIMIDAPLGSAAFNNEFGRPALLGYFRTYEEKVNSFAGKEVRGYHKPIMLAGGIGNIRGEQVQKGEIPIGAKLIVLGGAAMNIGLGGGAASSMDSGKSKEDLDFASVQRENPEMERRCQEVIDRCWQLGEENPILFIHDVGAGGLSNAMPELVHDGKRGGKFDLRSILCDEKGMSPLEIWCNESQERYVLAVAPENLELFTALCKRERTPFAVIGEATQAEHLILHDSHFDNNPIDLPMNVLLGKTPKMTREVLSKTVENQSLKTEGIQLKEAFHRVLRLPVVAEKTFLITIGDRSVTGMVARDQMVGPWQIPVSDVAVTTASLDSYHGEAMAMGERSPVALLDFSASARLAVAEAITNIAGTLIGEMKRIKLSANWMSAAGHTGEDAGLYEAVKAVGEELCPALGLTIPVGKDSMSMKTTWIDNGEQKSVTAPLSLVISAFARVEDVRKTLTPQLRTDKGLSSLLLIDLGEGHNRLGATALAQVYKQLGDKPADVVKVQRLKDFYNAMQTLVAEDKLLAYHDRSDGGLITTLAEMAFAGHCGVEVDISALGDNDLAVLFNEELGAVIQVADSQLESVREVLKAHNLLGITHQLGTVTVDDRFEISRGSHKLFSEKRSELRSIWAELTYQMQRLRDNPECAEQEFEAKKNPDDKGLSAFLTYDVNEDITAPFINKGVKPTIAILREQGVNSHYEMAAAFDRAGFNAIDVHMSDLMIGRRNLAEFNAMVACGGFSYGDVLGAGGGWAKSILFNPKLHEQFSQFFINPNTLTLGVCNGCQMISNLAEIIPGTENWPHFVRNKSERFEARVSLVKINEVDSVWFAGMAGSHMPIAVSHGEGQVKFKSVEQFAGLKAQGIIAAQYIDNNGSPTELYPANPNGSSEGITAITNLDGRVAIMMPHPERVFRAVSNSWHPENWTEDGAWMRLFRNARMVF

SEQ ID NO: 1577 - DNA, 318 bp, Haemophilus influenzae
atgttaatcacattaacacatattaataataacttgataataagaaatgaaattttagatagtcttggcaagcaagcaagcaagcaagcaagcaagcaagcaagcaagcaagcaagcaagcaagcaagcaagcaagcaagcaagcaagcaaagagtgacttaaatagtacatcacaaagcaaacaaattattcttcaagaaataaataaggtaaaagaaaagagaacaatattagaaaaaataataagattgtttactaaacataaaagaattactgctaaacaaaataagcagaaatttatcgttccatttaaataa

SEQ ID NO: 1578 - protein, 105 aa, Haemophilus influenzae
MLITLTHINNNLIIRNEILDSLGKQASKQASKQASKQASKQASKQASKQAKSDLNSTSQSKQIILQEINKVKEKRTILEKIIRLFTKHKRITAKQNKQKFIVPFK

SEQ ID NO: 1579 - DNA, 744 bp, Haemophilus influenzae
atgtttattacacctatcttcattattaatctagaaaaatctacagatcgaaaagcttatatgcaagcacagtttgaactgttattttcgaataatttaatacaagaaattcacttttttgatgctatttatggaaaatcaaatccgaatcacccattgtttcaacgttacaatgaaaataagcggttgaatgcaaaggggtatcctttaaccttgggtcaattaggctgttatgctagccattattctatgtgggagaaatgtgtagaattagattaccctattattgtattagaagatgatgctaaatttaaaaataatttcttagaagtacttgattttattaatagcgataaaaatacgtttgaatttttctggttacaacctgatcgtttgaaaaataaaagaaaattgatctctaatttcggtaatctttcgatatatcaatttagtaaaggatttgctggtgctacaggttattatttaactccccaagcagcaaggaaatttttaacacaaagcaaggagtggtatttaaccgtggatgtgacaatggatcgtttttttgagaataaagtgccaccttatgcaatagtaccattttgcttagaagatgatggcgagatagaatcaactatttatgagaaacaaaagaaacagagatcattaaaaatagtgattatgagagagttgtttaatctaaaaactaatattaaaagacgtatttataacttattccattga

SEQ ID NO: 1580 - protein, 247 aa, Haemophilus influenzae
MFITPIFIINLEKSTDRKAYMQAQFELLFSNNLIQEIHFFDAIYGKSNPNHPLFQRYNENKRLNAKGYPLTLGQLGCYASHYSMWEKCVELDYPIIVLEDDAKFKNNFLEVLDFINSDKNTFEFFWLQPDRLKNKRKLISNFGNLSIYQFSKGFAGATGYYLTPQAARKFLTQSKEWYLTVDVTMDRFFENKVPPYAIVPFCLEDDGEIESTIYEKQKKQRSLKIVIMRELFNLKTNIKRRIYNLFH

SEQ ID NO: 1581 - DNA, 843 bp, Haemophilus influenzae
atgaatattctgataaaaagtgcggtaaaaaatttcattgttttttctaccgcactttatacctctttttcttttgctcaaagtaaacttgctattgtgattgatgatgtaggctatcatctcaaagaagatgcagcaatttttgcgatgccacgtgaaatttccgtagcaattattcctgctgcgccctatgctcgagcacgtaatcaagaagcaaaatctcaaggtagagatattttaatccatatgccgatgcaaccagtaagtgcagtgaaaatagaagacggagggctgcatttaggaatgtctgcagcacaagtaaatgatcgcgttaatactgctaaaaatattgtgcgtgatgccatcggtatgaacaatcatatggggagtgcagcaacggcagatccccaattaatgacttatttaatgaccgctcttcaagaaaaacatttattctttttagatagtcgaacaataggaaaatctgtagctggaaaaatagcaaaagagcaaggcgtgcgttcattagatcgccatatatttttagatgatagtaacgaattcgcagacgttcaacgtcaatttaaagcagcaattcactatgctagaaaacacggctccgccattgcaataggtcatcctcgtccaaatacgattgctgttttacaagcaggtcttcgtaatttacccgaagatattcaattagtcggaatgggcaacttatggcgaaatcaaaaagttattccgcccaagccatttattttattattcagcgaagtgcctgcgccaacttctatagaaccttttgagcctgtaggattactacgtggaattccaaaataa

SEQ ID NO: 1582 - protein, 280 aa, Haemophilus influenzae
MNILIKSAVKNFIVFSTALYTSFSFAQSKLAIVIDDVGYHLKEDAAIFAMPREISVAIIPAAPYARARNQEAKSQGRDILIHMPMQPVSAVKIEDGGLHLGMSAAQVNDRVNTAKNIVRDAIGMNNHMGSAATADPQLMTYLMTALQEKHLFFLDSRTIGKSVAGKIAKEQGVRSLDRHIFLDDSNEFADVQRQFKAAIHYARKHGSAIAIGHPRPNTIAVLQAGLRNLPEDIQLVGMGNLWRNQKVIPPKPFILLFSEVPAPTSIEPFEPVGLLRGIPK

SEQ ID NO: 1583 - DNA, 1236 bp, Haemophilus influenzae
atgttgcgttttggcgttaatcaaaaaacatcatcattattattaaccgcacttttaagctgcggtttattaatattttcgcctgtcagccaatcttccgatctcaatcaaattcaaaaacaaattaagcaacaagaatctaaaatagagaagcaaaaacgtgagcaagctaagttacaagcaaatttaaaaaaacacgagagtaaaattaacagtgttgagggcgaactgcttgaaaccgaaataagtttaaaggaaattcgtaagcaaattgccgatgcagataagcaactcaaacaattagaaaaacaggaacgtgagcaaaaagcacgattagccaaacaaatagatataatttatcgttcaggcattaatccatcgctgattgaacgaatgtttgcccaagatccgacaaaagcagagcgaatgaaagtttattatcagcatttaaatcaagttcggattgaaatgattaataatttaaaagcaacgcaagcacaaattgcagtacaaaaaaaggcggttctctctcaacaaaagaatcaccgaaatcaactttccacacaaaaaaaacaacaacaagcattgcaaaaagcacagcaagagcatcaatctacactgaatgaactcaataaaaatttagccctagatcaagataaattgaatgcactaaaagcaaacgaacaagcacttcgtcaagaaattcaacgagctgaacaagcagcgcacgaacaagaaaaacgtgaaagagaggcacttgctcaacgccaaaaagctgaagaaaaacgaacatcaaaaccttatcaaccaactgtgcaagaacgccaattacttaatagtacaagcggtttaggggcggcaaaaaaacaatattccttaccagtttctggttcaattttgcatacttttggttctatccaagcaggcgaagtacgttggaaaggtatggtaattggcgcatcagcaggcacacctgttaaagcaattgctgctggacgcgtcattttagcgggatatttaaatggttatggttatatggttattgttaaacacggcgaaactgatttaagtttatatggcttcaatcaaacggtatcagtgaaagttggtcagcttgtttcagcagggcaggttattgctcaagtaggaaatacaggggaaatatcacgttctgcgctttattttggtattagccgtaaaggaacgccagtaaatcctgcagggtgggttcgttga

SEQ ID NO: 1584 - protein, 411 aa, Haemophilus influenzae
MLRFGVNQKTSSLLLTALLSCGLLIFSPVSQSSDLNQIQKQIKQQESKIEKQKREQAKLQANLKKHESKINSVEGELLETEISLKEIRKQIADADKQLKQLEKQEREQKARLAKQIDIIYRSGINPSLIERMFAQDPTKAERMKVYYQHLNQVRIEMINNLKATQAQIAVQKKAVLSQQKNHRNQLSTQKKQQQALQKAQQEHQSTLNELNKNLALDQDKLNALKANEQALRQEIQRAEQAAHEQEKREREALAQRQKAEEKRTSKPYQPTVQERQLLNSTSGLGAAKKQYSLPVSGSILHTFGSIQAGEVRWKGMVIGASAGTPVKAIAAGRVILAGYLNGYGYMVIVKHGETDLSLYGFNQTVSVKVGQLVSAGQVIAQVGNTGEISRSALYFGISRKGTPVNPAGWVR

SEQ ID NO: 1585 - DNA, 684 bp, Haemophilus influenzae
atggaattagtatttatccgtcacggttttagtgaatggaatgcgaaaaacttattcacaggctggcgtgatgtgaatttaactgaacgtggtgtggaagaagcaaaagctgcgggtaaaaaactgttagacaaaggttatgaatttgatatcgcatttacctctgttttaactcgagcaatcaaaacttgtaacatcgtgttagaagaatcccatcaattatggattccacaagtaaaaaactggcgtttaaatgaacgtcattatggtgctttacaaggtttagataaaaaagcgactgcggagcaatacggtgacgaacaagttcatatttggcgtcgttcttacgacatttctccaccagatttagatccacaagatccaaattctgcacacaatgaccgtcgctacgcaaatattccatctgatgttgtgccaaacgcagaaaatttaaaattaacattagaacgtgcattaccattctgggaagatcaaattgcaccagcaatgctttctggcaaacgtgttttagtggttgctcacggaaattcacttcgtgcgttggcaaaacatattatcggtatttctgatgctgaaattatggattttgaaattccaacaggccaacctttagttttaaaacttgatgataaattaaattacgtagaacattactatctttaa

SEQ ID NO: 1586 - protein, 227 aa, Haemophilus influenzae
MELVFIRHGFSEWNAKNLFTGWRDVNLTERGVEEAKAAGKKLLDKGYEFDIAFTSVLTRAIKTCNIVLEESHQLWIPQVKNWRLNERHYGALQGLDKKATAEQYGDEQVHIWRRSYDISPPDLDPQDPNSAHNDRRYANIPSDVVPNAENLKLTLERALPFWEDQIAPAMLSGKRVLVVAHGNSLRALAKHIIGISDAEIMDFEIPTGQPLVLKLDDKLNYVEHYYL

SEQ ID NO: 1587 - DNA, 213 bp, Haemophilus influenzae
atgaaacaaggtattcatccagaatataaagaaattactgcgacttgttcttgcggtaatgtgatcaaaacacgttcaactttaggcaaagacatcaatcttgatgtgtgtggtaactgccacccattctacactggtaaacaacgtgttgttgatactggtggtcgtgtcgagcgtttcaacagccgtttcaaaattccaagcacaaaataa

SEQ ID NO: 1588 - protein, 70 aa, Haemophilus influenzae
MKQGIHPEYKEITATCSCGNVIKTRSTLGKDINLDVCGNCHPFYTGKQRVVDTGGRVERFNSRFKIPSTK

SEQ ID NO: 1589 - DNA, 186 bp, Haemophilus influenzae
ttggcaaatggcacattgatggaagattttgctaacataaaaagaaaagtgcggttaaaaatgctgatgattttacacgaaaatagagcttgtttatctgcattttttcagtataattcgcaacctatttggtgccaattatggcgtattattcactcacgcggtgtggggagaaagttcctatag

SEQ ID NO: 1590 - protein, 61 aa, Haemophilus influenzae
MANGTLMEDFANIKRKVRLKMLMILHENRACLSAFFQYNSQPIWCQLWRIIHSRGVGRKFL

SEQ ID NO: 1591 - DNA, 1113 bp, Haemophilus influenzae
gtgccatttgccaaatctgttttagcttggtacgacaagtttggacgcaagcatttaccttggcagcaaaataaaacgctttatggtgtatggctttctgaagtgatgttgcaacaaacgcaagttgcgacggtaattccttattttgagcggtttatcaaaacatttccaaatatcatcgcacttgccaatgcttcacaagatgaagtgttacatttatggacaggcttaggctattatgcacgagcgcgtaatttacataaagccgctcaaaaagtgcgggatgaatttaatggaaatttcccaacaaattttgagcaagtttgggcgttatctggagtgggacgttcaactgctggtgccattttatcttctgttttaaatcagccttatccaattttagatggtaatgtgaaacgtgtgttggcacgttattttgctgttgagggatggagtggcgagaaaaaagtagaaaatcgcttgtgggcattaacggagcaagttacacctacgacgcgtgtggcagattttaatcaagcaatgatggacattggtgcaatggtttgcacgcgaactaagcccaaatgcgatctttgtccgttaaatatagattgtttggcttataaaaatacaaactgggaaaaatttccagctaaaaaacctaaaaaagcgatgccagaaaaaactacctattttttaattttgtcgaaaaatggcaaagtatgtttggaacagcgagaaaactcaggattatggggcggattattttgttttccacaatttgaagataaatcctcgttgcttcattttttagcccaagaaaaagtcacgcattatcaagaatggccgagttttcgacatacatttagccattttcatttagatattcatccaatttatgccgaaatggagagtactttatgcgtagagcaggctaatttagactggcgaaaagtgatggaaagcacaaaagaataccaatcaaacctatcaagtgcggtcaaatattggtatgatccacaaaatcctgaaccgatcgggctggctcagcctgtgaaaaatcttttaatacaatttgtaaggaatcattatggcaagaacagtattttgtga

SEQ ID NO: 1592 - protein, 370 aa, Haemophilus influenzae
MPFAKSVLAWYDKFGRKHLPWQQNKTLYGVWLSEVMLQQTQVATVIPYFERFIKTFPNIIALANASQDEVLHLWTGLGYYARARNLHKAAQKVRDEFNGNFPTNFEQVWALSGVGRSTAGAILSSVLNQPYPILDGNVKRVLARYFAVEGWSGEKKVENRLWALTEQVTPTTRVADFNQAMMDIGAMVCTRTKPKCDLCPLNIDCLAYKNTNWEKFPAKKPKKAMPEKTTYFLILSKNGKVCLEQRENSGLWGGLFCFPQFEDKSSLLHFLAQEKVTHYQEWPSFRHTFSHFHLDIHPIYAEMESTLCVEQANLDWRKVMESTKEYQSNLSSAVKYWYDPQNPEPIGLAQPVKNLLIQFVRNHYGKNSIL

SEQ ID NO: 1593 - DNA, 273 bp, Haemophilus influenzae
atggcaagaacagtattttgtgaatatctcaaaaaagaagcggaaggcttagattttcaactttatccaggagagttggggaagcgtatttttgattcagtaagtaaacaggcttggggcgaatggattaagaaacaaacgatgcttgtgaatgaaaaaaaacttaatatgatgaatgcagagcaccgtaaattattagaacaagaaatggttaattttttgtttgaaggtaaagatgttcatattgaaggttatgttccaccatcaaattag

SEQ ID NO: 1594 - protein, 90 aa, Haemophilus influenzae
MARTVFCEYLKKEAEGLDFQLYPGELGKRIFDSVSKQAWGEWIKKQTMLVNEKKLNMMNAEHRKLLEQEMVNFLFEGKDVHIEGYVPPSN

SEQ ID NO: 1595 - DNA, 1074 bp, Haemophilus influenzae
atgaaaaaatatttattattggcattattgccttttttgtatgcttgtagtaattcatcgaatcaaggtattaactatgatgaagcctttgctaaagacacgcaagggttagatattctcacagggcaattctcgcataatattgaccgcatttggggcgtcaatgaattgttagtggctagtcgaaaagattacgtgaaatatacagattctttttatacgcgtagccatgtgagttttgatgaaggtaatatcgttattgaaacccagcaagatttaaatcgattacataatgctattgttcataccttgttaatgggagcggatgcaaaaggtattgatttatttgcatctggtgatgtgccgattagctctcgcccattccttttggggcaggttgtggatcatcaagggcaacaaattgctaatcaagttatcgcaagtaatttcgccacttatttgattcaaaataaattgcaaactcgtcggttacagaatgggcataccgtgcaatttgtctctattcctatgattgcaaaccacgtagaggtgcgtgcgcgaaaatatttaccattgattcgtaaagctgcacaacgttatggcattgatgaaagtttgattttgggtattatgcaaacagaatcaagttttaacccatatgcgattagctatgccaatgccattggtttaatgcaggtagttcctcacactgcgggtcgagatgtatttacaatgaaaggcaaaggtggacagccatcaacgcgttatttatatgatcctgcaaataatattgatgctggcgtgtcttatttatggattttgcaaaatcaatatttagatggtattacaaatccaacctcaaaacgttttgcaatgatttctgcatataatagtggtgcaggtgcagtgttacgtgtttttgataatgataaggatacggcgatttacaaaatcaaccaaatgtatccagagcaagtttatcgtattctaacgactgctcacccatcatcacaagctcgcaattatttgttgaaagttgataaggcacagaaaaaattccgtgtaagacgataa

SEQ ID NO: 1596 - protein, 357 aa, Haemophilus influenzae
MKKYLLLALLPFLYACSNSSNQGINYDEAFAKDTQGLDILTGQFSHNIDRIWGVNELLVASRKDYVKYTDSFYTRSHVSFDEGNIVIETQQDLNRLHNAIVHTLLMGADAKGIDLFASGDVPISSRPFLLGQVVDHQGQQIANQVIASNFATYLIQNKLQTRRLQNGHTVQFVSIPMIANHVEVRARKYLPLIRKAAQRYGIDESLILGIMQTESSFNPYAISYANAIGLMQVVPHTAGRDVFTMKGKGGQPSTRYLYDPANNIDAGVSYLWILQNQYLDGITNPTSKRFAMISAYNSGAGAVLRVFDNDKDTAIYKINQMYPEQVYRILTTAHPSSQARNYLLKVDKAQKKFRVRR

SEQ ID NO: 1597 - DNA, 681 bp, Haemophilus influenzae
atgattttatttgctggagatccgcacggaagctatgatcacatttacccttttataaaagaacaggaaaatgtcgcactgataattttaggcgatttacagctcacgacagcagatgaattggataaacttgcacaacattgtgatatttggtttattcatggaaatcatgatagcaaaaccattagtgcttttaatgcaatttggggttctaagtggcaatcacgcaatttgcacaatcgcgtagttgatattcaaggaactcgcattgcgggattaggcggtgtattccgtgggcaaatttggatgccaccaaatcgccccatgttttttgatcctattcattattgccaatatagcccacaggagaagatttggcgaggcggtgtgcctttgcgtcatcgcacgtcaatttttccatccgatattgaaatcttagaaaaccaacaagcagatgtgttgatttgtcacgaagcccctaaaccacatccgatgggtttccaagtaattaatgatttggcaatgaagatgggggttaagctagtattccacggacatcatcacgaaaactttacttatcgaacaaagtatccctacaaaatcacgaatgtaggtttccgcagtcttgctgatgcagagggaaattatttgctacaaaccatcgatgatcgtgaaaaataa

SEQ ID NO: 1598 - protein, 226 aa, Haemophilus influenzae
MILFAGDPHGSYDHIYPFIKEQENVALIILGDLQLTTADELDKLAQHCDIWFIHGNHDSKTISAFNAIWGSKWQSRNLHNRVVDIQGTRIAGLGGVFRGQIWMPPNRPMFFDPIHYCQYSPQEKIWRGGVPLRHRTSIFPSDIEILENQQADVLICHEAPKPHPMGFQVINDLAMKMGVKLVFHGHHHENFTYRTKYPYKITNVGFRSLADAEGNYLLQTIDDREK

SEQ ID NO: 1599 - DNA, 1113 bp, Haemophilus influenzae
atgtcaaaaacaaaagagaaaaaagtcggtgtcattttcgggaaattttatcctgtacacacaggtcatataaatatgatttatgaagcgttcagtaaagtcgatgaactgcacgttatcgtgtgtagtgatacggaacgtgatttgaaattattttacgatagtaaaatgaaacgcatgccaaccgtgcaagatcgtttgcgttggatgcagcaaattttcaaatatcaaaaaaatcagatttttattcatcatttgattgaagacggtattccaagttatccaaacggctggcaatcttggagtgaagcagttaaaaccctatttcatgaaaaacattttgaaccttcaatcgtatttagtagcgagcctcaagataaagcgccttacgagaaatacttaggtttagaagtatcgttagtcgatcctgaccgcactttctttaatgtgtccgcaaccaaaattcgcaccactccattccaatattggaagtttattccgaaagaagctcgtcctttctttgccaaaacggtggcgattttagggggagaaagcagtggtaaaagcgtgctagttaataagttagccgccgtatttaataccacttctgcgtgggaatacgggcgtgaatttgtatttgaaaagctcggtggcgacgagcaagcgatgcaatattctgactatccgcaaatggcgcttggtcatcaacgatacattgattatgccgtgcgccattctcataaaattgcatttattgatacggatttcattaccacgcaagcgttctgcattcaatatgaaggaaaagctcatccatttttagactcaatgattaaagaatatcccttcgatgtcactattttgcttaaaaataatactgaatgggtggatgatggcttgcgtagcttaggttcacaaaagcaacgccaacaatttcaacaactactcaaaaaactgttagataaatataaagttccttacatagagattgaatcgccaagttatcttgaacgttataaccaagttaaagccgtcattgagaaagtgttaaatgaagaagaaatcagtgaattacaaaacgcaacttttcctataaaggggatatctcaatga

SEQ ID NO: 1600 - protein, 370 aa, Haemophilus influenzae
MSKTKEKKVGVIFGKFYPVHTGHINMIYEAFSKVDELHVIVCSDTERDLKLFYDSKMKRMPTVQDRLRWMQQIFKYQKNQIFIHHLIEDGIPSYPNGWQSWSEAVKTLFHEKHFEPSIVFSSEPQDKAPYEKYLGLEVSLVDPDRTFFNVSATKIRTTPFQYWKFIPKEARPFFAKTVAILGGESSGKSVLVNKLAAVFNTTSAWEYGREFVFEKLGGDEQAMQYSDYPQMALGHQRYIDYAVRHSHKIAFIDTDFITTQAFCIQYEGKAHPFLDSMIKEYPFDVTILLKNNTEWVDDGLRSLGSQKQRQQFQQLLKKLLDKYKVPYIEIESPSYLERYNQVKAVIEKVLNEEEISELQNATFPIKGISQ

SEQ ID NO: 1601 - DNA, 99 bp, Haemophilus influenzae
gtgaaattccctaccggtggtaaagcccacgagcgtttaaaagtgcggtcaatttttggcaaatttttcttgctaaattgtcctgattttcacttttaa

SEQ ID NO: 1602 - protein, 32 aa, Haemophilus influenzae
MKFPTGGKAHERLKVRSIFGKFFLLNCPDFHF

SEQ ID NO: 1603 - DNA, 648 bp, Haemophilus influenzae
atgaatcagtcaattttatctccattcggcaacaccgctgaagaacgcgtacttaatgcaattaatgcctttaaaaatggaactggcgtattagttttagatgatgaagatcgtgaaaatgaaggcgatttaattttcccagcagaaacaatcacgtcagaacaaatggcaaaattaattcgttatggcagtggtatagtttgtttatgcattactgatgaacgttgccaacaactcgatttaccgccaatggtagaacacaataatagcgtaaacaaaacggcttttactgtaacgattgaagccgcaaaaggtgtttctacaggcgtatctgccgcagaccgagtaaccactattcaaacggctattgctgataatgcagttccaacagatttacatcgtccaggtcatgtcttcccacttcgtgcagcaaatggtggcgtacttactcgtcgcggacacacagaagcttccgttgatttagcgcgtctggcaggatttaaagaagcaggcgttatttgtgaaattacgaatgacgacggcacaatggcgcgcacccccgagattgtagaatttgcgaaaaaatttggttattcggtgctaaccattgaagatttagttgaatatcgtttagcacataatatttaa

SEQ ID NO: 1604 - protein, 215 aa, Haemophilus influenzae
MNQSILSPFGNTAEERVLNAINAFKNGTGVLVLDDEDRENEGDLIFPAETITSEQMAKLIRYGSGIVCLCITDERCQQLDLPPMVEHNNSVNKTAFTVTIEAAKGVSTGVSAADRVTTIQTAIADNAVPTDLHRPGHVFPLRAANGGVLTRRGHTEASVDLARLAGFKEAGVICEITNDDGTMARTPEIVEFAKKFGYSVLTIEDLVEYRLAHNI

SEQ ID NO: 1605 - DNA, 837 bp, Haemophilus influenzae
atgatttttttaccgcactttttatattatactgttccaactttttatttatttgggttacttattatgcataatgcagctcagcacaattatgttatcagtttaactaccgaacaaaaacgccgaaaacacattaccgaagaattcggtaagcagaatattcctttcgaattttttgatgctattacgcccgacattattgaagaaaccgctaaaaaatttaatatcatctttgaccgttcatcaaaagcaactttgtgtgatgctgagatagcctgtgcattaagccatatcgttttatggaatttcgttttagaaaataatttagattatattaatatttttgaagacgatatttatttgggagaaaatgcaaaagaattgttgaatattgattatatacctgaagatactgatatattgaagttagaagctcatggaaaaataatttatggaaagtgtgagcaaataaaatgtaatagaaatatttcccgattgaaattcaaacatactggaatggctggctattcaatcacagctaagggtgctagatatttattgaataacataagaaataaacaactttatcttgctattgatactctaatttttgatgaattattaggcaaaaaagattataaagttatgcaactttcccctgcaatatgcgctcaaagttttattctgcatgatgaaaattattttgagagtagtttgcataatggtagggaaaaagtgcataaaaaccaaattcccgctaaacctttagctaaaataaaaaatgaactaattagaataaaaaaacggatattcggaaaacaagttccatttaaataa

SEQ ID NO: 1606 - protein, 278 aa, Haemophilus influenzae
MIFLPHFLYYTVPTFYLFGLLIMHNAAQHNYVISLTTEQKRRKHITEEFGKQNIPFEFFDAITPDIIEETAKKFNIIFDRSSKATLCDAEIACALSHIVLWNFVLENNLDYINIFEDDIYLGENAKELLNIDYIPEDTDILKLEAHGKIIYGKCEQIKCNRNISRLKFKHTGMAGYSITAKGARYLLNNIRNKQLYLAIDTLIFDELLGKKDYKVMQLSPAICAQSFILHDENYFESSLHNGREKVHKNQIPAKPLAKIKNELIRIKKRIFGKQVPFK

SEQ ID NO: 1607 - DNA, 483 bp, Haemophilus influenzae
atgttagatatcgttttatatgaaccagaaatcccacaaaataccggtaacattattcgcctttgtgccaacacaggatttcgcttgcacttaattgaaccactaggtttcacttgggatgataaacgcttacgccgctcaggtttggattatcacgaatttgcggaaatcaaacgccacaaaacctttgaagcctttttagaaagcgaaaaacccaaacgcctttttgcacttacaacaaaaggctgtccagctcatagccaggtgaaatttaaacttggggattatttaatgtttggcccagaaactcgtggcattccgatgtcaattttaaatgaaatgccgatggaacaaaaaatccgcattccaatgactgccaatagccgcagtatgaacttatctaattctgtcgcagtaacggtttatgaagcgtggcgacaattaggctataaaggtgcggtaaatttaccagaagtaaaataa

SEQ ID NO: 1608 - protein, 160 aa, Haemophilus influenzae
MLDIVLYEPEIPQNTGNIIRLCANTGFRLHLIEPLGFTWDDKRLRRSGLDYHEFAEIKRHKTFEAFLESEKPKRLFALTTKGCPAHSQVKFKLGDYLMFGPETRGIPMSILNEMPMEQKIRIPMTANSRSMNLSNSVAVTVYEAWRQLGYKGAVNLPEVK

SEQ ID NO: 1609 - DNA, 582 bp, Haemophilus influenzae
atgaaaaaaatacaaacgccaaatgcaaagggcgaagttcgcattattgcaggtctatggcgagggcgaaaacttcccgtattaaattctgaaggcttacgcccaactggcgatagagtgaaagaaacgctttttaattggttaatgccttatatccaccaatctgaatgtttagatggttttgcggggagtggttcattaggttttgaagcactttctcgccaagcgaaaaaagtgacttttttagaactagataaaactgttgccaatcaattaaaaaagaatttacaaacactcaaatgctcatcagaacaggctgaagtaattaatcaaagtagtttggattttctaaaacagccacaaaatcaaccgcactttgatgtcgtatttttggatccaccctttcattttaatttggcagaacaagcaattagtttgctttgtgaaaataactggctaaaacccaatgcgttaatttacgtagaaacagagaaagataaaccgcttattactcctgaaaactggacgttattgaaagaaaaaacgacgggaatagtgagctatcgtttatatcagaattag

SEQ ID NO: 1610 - protein, 193 aa, Haemophilus influenzae
MKKIQTPNAKGEVRIIAGLWRGRKLPVLNSEGLRPTGDRVKETLFNWLMPYIHQSECLDGFAGSGSLGFEALSRQAKKVTFLELDKTVANQLKKNLQTLKCSSEQAEVINQSSLDFLKQPQNQPHFDVVFLDPPFHFNLAEQAISLLCENNWLKPNALIYVETEKDKPLITPENWTLLKEKTTGIVSYRLYQN

SEQ ID NO: 1611 - DNA, 1203 bp, Haemophilus influenzae
atggctgaagaaaataaaaaaggcggattttgggcatcgttatttggacgtaataaaaagcaagatgaacctaaaattgagccaataattgaagaagaaaagataaaagatatcgagccgtctattgaaaaatttgaagctaatgatttagtcgaagaagaaaaaatacaggaaatttcaaccgcacttgagccgattgaagaaatcatcgaagcgaaaaatttagaagatgatcttcagcccgttgttgaaattgaaactcgcgaaaagccaagtgaagggggcttttttagtcgtttagttaagggattactgaaaactaaacaaaatattggcgcgggttttcgtggttttttcttaggaaagaaaattgatgatgagttgtttgaagaattagaagaacaacttttaattgcggatattggtgtgccgacaacaagtaaaatcatcaaaaatttgactgaacacgcaagccgcaaagaattacaagatgccgagcttttatatcaacaattaaaagtagaaatggcggatattcttgagccagtagcacaacctttagagattgatagcacgaaaaaaccttatgtgattttaatggtgggcgtaaatggcgtgggtaaaacaacgacaattggtaagctcgcacgtaaatttcaggctgaaggaaaatcagtgatgcttgcggcgggcgatactttccgtgcagcggccgttgagcagcttcaagtttggggagaacgcaatcatattccagttgttgcgcaaagcacgggttctgattctgcgtctgtgatttttgatgcgatgcaatcagcggctgcacgcaatattgatattcttattgcggatacggcgggtcgtttacaaaataaaaataacttaatggacgaactgaaaaaaattgttcgtgttatgaaaaaatatgatgaaactgcgccacatgaaattatgcttacgctggatgctggcacgggacaaaatgccattagccaagcgaagttatttaatgaggctgtgggtttaacaggaatctctctaacaaaattagatggcacggcaaaaggtggcgtgatttttgccatagccgatcagtttaagttgcctattcgctatatcggtgtaggcgagaaaattgaagatttacgtgagtttaatgcgaaagaatttattgaggcattattcgttcatgaagaagaataa

SEQ ID NO: 1612 - protein, 400 aa, Haemophilus influenzae
MAEENKKGGFWASLFGRNKKQDEPKIEPIIEEEKIKDIEPSIEKFEANDLVEEEKIQEISTALEPIEEIIEAKNLEDDLQPVVEIETREKPSEGGFFSRLVKGLLKTKQNIGAGFRGFFLGKKIDDELFEELEEQLLIADIGVPTTSKIIKNLTEHASRKELQDAELLYQQLKVEMADILEPVAQPLEIDSTKKPYVILMVGVNGVGKTTTIGKLARKFQAEGKSVMLAAGDTFRAAAVEQLQVWGERNHIPVVAQSTGSDSASVIFDAMQSAAARNIDILIADTAGRLQNKNNLMDELKKIVRVMKKYDETAPHEIMLTLDAGTGQNAISQAKLFNEAVGLTGISLTKLDGTAKGGVIFAIADQFKLPIRYIGVGEKIEDLREFNAKEFIEALFVHEEE

SEQ ID NO: 1613 - DNA, 567 bp, Haemophilus influenzae
atgacttacttagttgggcattcaggcgcagggaaaagtacattactcaagcttattatggggatggaaaaagccaacgcaggtcaaatttggtttaacgggcatgatattactcgcttgtcaaaatatgaaattccatttctgcgtcgccaaattggtatggttcatcaagattatcgtttattaacagatcgtacagtggtggaaaatgtggcattgccgttgattattgcaggtatgcatccaaaagatgcgaatactcgagcaatggcatctttagatcgtgtaggattgcgtaataaagcccactatttgccaccgcaaatttctggcggggaacagcaacgcgttgatattgcgcgtgcgattgtgcataaacctcagctcttattggcagatgaaccaacgggtaatttagacgatgaactttccgtagggatttttaatttgtttgaagaatttaatcgtctaggaatgactgtgttaattgctactcacgacattaatttaattcaacaaaaaccaaaaccttgtcttgtgcttgaacaaggttatttacgttattaa

SEQ ID NO: 1614 - protein, 188 aa, Haemophilus influenzae
MTYLVGHSGAGKSTLLKLIMGMEKANAGQIWFNGHDITRLSKYEIPFLRRQIGMVHQDYRLLTDRTVVENVALPLIIAGMHPKDANTRAMASLDRVGLRNKAHYLPPQISGGEQQRVDIARAIVHKPQLLLADEPTGNLDDELSVGIFNLFEEFNRLGMTVLIATHDINLIQQKPKPCLVLEQGYLRY

SEQ ID NO: 1615 - DNA, 933 bp, Haemophilus influenzae
atgagccgatcaacggatgcatctgtttttgttcaaacagcctatactttgcgtgcagtatgggcggatttatggcaacgtaaatttggcacgctgctcacgattttagtgattgccgtttcgcttacgatcccgactgtgagctatttaatgtggaaaaatttgcatttagccaccactcaattttatcctgaaagtgaattgactatttatcttcataaaaatttaagtgaggaaaatgcgaatttagtggtagagaaaatccgtcagcaaaaaggcgtggaatcactgaattatgtttctcgtcaagaaagtttaaaggaatttaaaagctggtctggctttggcgaagaattagaaattttagatgataatccattgcctgcggtcgttatagtaaaaccgacgagcgaatttaatgtttcagaaaaacgtgacgaattacgtaccaatttaaataaaattaaaggcgtgcaagaagttcgcttagataacgattggatggaaaaattgaccgcactttcttggttaatcgcccatgtggcaattttctgcactgtattaatgacgatagcggtatttttagttattggtaacagtattcgctctgatgtgtacagtagccgatcaagtattgatgtgatgaaattgcttggtgcaacagatcagtttatccttcgtccttatctttatacagggatgatttatgccctgttgggtgggttagttgcagcaatttttagtagctttattatcagctattttacttctgcggtgaaatatgtaacggatatttttgccgtccaattcggtttgaatggattaggcgttggcgaatttgtattcttattagtgtgctgtttaattatgggctatgttggggcgtggattgccgcgacaaggcatattgcgatgatggagaggaaagaataa

SEQ ID NO: 1616 - protein, 310 aa, Haemophilus influenzae
MSRSTDASVFVQTAYTLRAVWADLWQRKFGTLLTILVIAVSLTIPTVSYLMWKNLHLATTQFYPESELTIYLHKNLSEENANLVVEKIRQQKGVESLNYVSRQESLKEFKSWSGFGEELEILDDNPLPAVVIVKPTSEFNVSEKRDELRTNLNKIKGVQEVRLDNDWMEKLTALSWLIAHVAIFCTVLMTIAVFLVIGNSIRSDVYSSRSSIDVMKLLGATDQFILRPYLYTGMIYALLGGLVAAIFSSFIISYFTSAVKYVTDIFAVQFGLNGLGVGEFVFLLVCCLIMGYVGAWIAATRHIAMMERKE

SEQ ID NO: 1617 - DNA, 1182 bp, Haemophilus influenzae
atggaaaatgttgttattgttagtgcagttagaacaccgatcggcagctttaatggtgcattatcttccgtaagtgcggttgatttaggtgcaattgtgatacaagaagccatcaaacgtgccaacattgaaagtgcattagttaatgaagtcatcatggggaacgtattacaagcaggactaggacaaaatccagcccgtcaagcagcattaaaagcaggaatagagaaagaaatcccttctttaacaatcaataaagtatgtggatctggtctaaaaagtgtcgcattaggtgcacagtctattatcagtggtgatgctgatattgttgttgtgggtggcatggaaaatatgagccaagcaccttatcttttagatagcaaagtacgacaaggcgtcaaaatgggtaatctcacattaagggacacaatgattgaagacggactaacttgtgctagcaatcactatcatatggggattactgccgaaaatattgcagaacaatatggtattagccgccaagcacaagatgaactcgcattacgttcacaaaccttagcatctcaagccgtgcaattaggtgtatttgataaggaaattgtccctgttatggtaaaaactcgcaaaggtgacattattgtttcacgagacgagtatcctaaagcagatactacagctgaaggtttagctaaattaaaacctgctttcaaaaaagagggtactgtcaccgcaggtaacgcttctggcattaatgatggtgctgcagcacttattttagttagcgaaagcaaagctcatgcacttggattaaaagccattgcaaaaattagaagctatgccagcggtggggtagatccatctgttatgggattaggtccagttccagcaacgcaaaaagcattgaaaaaagcaggaataaatcttgatgatatcgatctgatagaagcaaatgaagcctttgcctcacagttcttaggtgttggcaaagatctcaatttggatatgaataaaaccaatattcatggtggagctatcgcacttgggcatccaatcggcgcgagtggtgcaaggattttagtaacgttattgcacaatcttatcgaaaaagataaaaaacttggacttgctacactttgtattggcggtggtcaaggtatttctatgattgtagaacgcttataa

SEQ ID NO: 1618 - protein, 393 aa, Haemophilus influenzae
MENVVIVSAVRTPIGSFNGALSSVSAVDLGAIVIQEAIKRANIESALVNEVIMGNVLQAGLGQNPARQAALKAGIEKEIPSLTINKVCGSGLKSVALGAQSIISGDADIVVVGGMENMSQAPYLLDSKVRQGVKMGNLTLRDTMIEDGLTCASNHYHMGITAENIAEQYGISRQAQDELALRSQTLASQAVQLGVFDKEIVPVMVKTRKGDIIVSRDEYPKADTTAEGLAKLKPAFKKEGTVTAGNASGINDGAAALILVSESKAHALGLKAIAKIRSYASGGVDPSVMGLGPVPATQKALKKAGINLDDIDLIEANEAFASQFLGVGKDLNLDMNKTNIHGGAIALGHPIGASGARILVTLLHNLIEKDKKLGLATLCIGGGQGISMIVERL

SEQ ID NO: 1619 - DNA, 1344 bp, Haemophilus influenzae
atgattagtcgcgtttctcgttttatgacgacattcgtcagtaaatacctgccagacccacttatttttgccgtgttactcacctttgtcacattcatttgtgcttggggattaaccgatagtacacctgttgatttagttaatatgtggggtaatggcttttggaatttacttggttttggtatgcaaatggcattaattgtcgtaactggtaatgctcttgcaacctcaccacaaattcgtaagtttctttctacaatcgcttcaatagcaaaaacaccagcacaaggtgttgtcttagttacgtttatgggttcaattgcctgtatcattaactggggcttcggtttggtcgttggtgcgatgtttgcaaaagaagtcgcgcggagaataaaaggcagtgactacgccttactgattgcctgtgcctatattgcatttatgacatggggtggaggtttttcaggctcaatgccacttttagccgcaacaccaggcaacccagttgctcatttaatggtgagcgaaagcaacccacaaggtattattcctgcagttagtacgcttttctctgggtacaatatttttatcacgttaagtttagtcatttgcttgcctttcattacctatatgatgatgcccaaaaatggcgaaacaaaaagtattgatccaaaacttattgcgcccgatccaacatttgataaaaaattggataaagatgcaacacttgctgaaaaaatggaagaaagccgcttcttagcctatacaatcggggcattaggatatagttacctcggtatgtatttctacaaaaacggattcaatctcacaattaataatgtaaaccttattttcttaatcacaggaattgtgcttcatggctcgccaatggcctatatgcgagcaattattaatgccacacgaagcacagcagggatcttagtgcaattcccattctatgcgggtgtgcaactaatgatggagcattcaggcttaggtggtttaatcaccgaattctttatcaatgttgctaacaaagattctttcccattattaaccttctttagttctgcctttattaactttgcagttccttctggtggcggtcactgggtcatccaaggaccatttgttatccctgctgctcaagcattaggtgcagatctaggtaagtctacaatggcgattgcctatggtgagcaatggatgaacatggctcagccattttgggcattaccagcactgggtatcgcagggcttggcgtgagagatattatgggcttctgtatgaccgcacttatcttcaccgcaccaatttttattattggtttatatttcttatag

SEQ ID NO: 1620 - protein, 447 aa, Haemophilus influenzae
MISRVSRFMTTFVSKYLPDPLIFAVLLTFVTFICAWGLTDSTPVDLVNMWGNGFWNLLGFGMQMALIVVTGNALATSPQIRKFLSTIASIAKTPAQGVVLVTFMGSIACIINWGFGLVVGAMFAKEVARRIKGSDYALLIACAYIAFMTWGGGFSGSMPLLAATPGNPVAHLMVSESNPQGIIPAVSTLFSGYNIFITLSLVICLPFITYMMMPKNGETKSIDPKLIAPDPTFDKKLDKDATLAEKMEESRFLAYTIGALGYSYLGMYFYKNGFNLTINNVNLIFLITGIVLHGSPMAYMRAIINATRSTAGILVQFPFYAGVQLMMEHSGLGGLITEFFINVANKDSFPLLTFFSSAFINFAVPSGGGHWVIQGPFVIPAAQALGADLGKSTMAIAYGEQWMNMAQPFWALPALGIAGLGVRDIMGFCMTALIFTAPIFIIGLYFL

SEQ ID NO: 1621 - DNA, 666 bp, Haemophilus influenzae
atgaatgcaaaagaattaatcgctcgccgaattgcgatggaattacatgatggagatattgttaatctcggtattggtttaccaacacaggttgttaattatttacctgataatgtcaatattacacttcaatcagaaaatggctttcttggtttaactgcatttgacccagaaaatgctaattcaaacttagtaaatgctggtggtcagccttgtggaattaaaaaaggcggcgctacttttgatagcgctttttctttcgctttaattcgtggcggtcatgttgatgcctgtgtgctaggtggacttgaagttgatcaagaagcaaatctcgctaactggatggtgcctggcaaaatggtaccaggaatgggcggagcaatggacttagtgactggtgcaaaaaaagtgattattggcatggaacattgtgccaagtcaggttcctcaaaaattctaaagaaatgtacattaccgctcacagcaagtaaaaaagttgccatggtggttaccgaattggcagtatttaacttcattgaaggcagattagttctaaaagaacatgctcctcatgtggatttagaaacaattaaagccaaaacagaagccgatttcattgttgccgatgatttcaaagaaatgcaaatcagccaaaaaggactttaa

SEQ ID NO: 1622 - protein, 221 aa, Haemophilus influenzae
MNAKELIARRIAMELHDGDIVNLGIGLPTQVVNYLPDNVNITLQSENGFLGLTAFDPENANSNLVNAGGQPCGIKKGGATFDSAFSFALIRGGHVDACVLGGLEVDQEANLANWMVPGKMVPGMGGAMDLVTGAKKVIIGMEHCAKSGSSKILKKCTLPLTASKKVAMVVTELAVFNFIEGRLVLKEHAPHVDLETIKAKTEADFIVADDFKEMQISQKGL

SEQ ID NO: 1623 - DNA, 654 bp, Haemophilus influenzae
atgacacaaaaacatcttaagcttaataatctaaatcaacacctacatgatggtatgagcatcatgtttggtggatttatgggtatcggcactccagccaaacttgtccaacaaatcttagattctggcgtaaaggatctcacactcataggcaatgacacagcctttattgacactggcgtaggccctttaattgtaaataatcgagtcaaacgtttaattacctcccatattggtacaaatccagaaactggcaaaaaaatgattgctggtgaaatagatgtagaactcgttccacagggtaccttagctgaacggattcgtgcaggtggcgccggattaggtggtattttaacaccaacgggtgtcggcactgttgttgaagaaggaaaacaaaaaattcaaattgatggcaaagaatatttgcttgaactcccactaaaagctgatattgccattatccatgctcaaaaaggtgacatgaatggcaatttagcttatgaattatctgctaggaactttaatccactagttgctttagcagccaaaactgtcattgcccaagttgataatctactagaggtcggtcagttacccccagatgaagtcatcacgccagccgcattaattgattacattgtttgttcagaataa

SEQ ID NO: 1624 - protein, 217 aa, Haemophilus influenzae
MTQKHLKLNNLNQHLHDGMSIMFGGFMGIGTPAKLVQQILDSGVKDLTLIGNDTAFIDTGVGPLIVNNRVKRLITSHIGTNPETGKKMIAGEIDVELVPQGTLAERIRAGGAGLGGILTPTGVGTVVEEGKQKIQIDGKEYLLELPLKADIAIIHAQKGDMNGNLAYELSARNFNPLVALAAKTVIAQVDNLLEVGQLPPDEVITPAALIDYIVCSE

SEQ ID NO: 1625 - DNA, 906 bp, Haemophilus influenzae
atgatggatattaggcatctaagatattttgtttcaatcgtagataatgattttaatttaagccgagcgtctcaaaatttatatgtgtctcaacctgcattaagtatgatgattacggagtttgagaatcgtgaaaatattcagatatttaaacgggcatcaggaaaaattattggactaacctttgcgggggaaaattattatcgtgatgcaaaagaagtgatcaagcgttacaatgatatgagaacaaatctttataaatcaaaagattgtaagaaaggcacgataacaattggtattcctcccttagttttatcagccgtgttctcttctgtattgcctcatcttattcttaagaatccagatattaattttattattaaagaaattggagcttatgctctaaagagtgaacttcttttagataaagttgatttagccgtgttgttatatcccgagcgaatatcaaaaaatattattgattcaattgaaattcatagttctgaattagccttatttctttcaccaaagcatgttttagcaaaaaaacaacaaatcacatgggctgatttacatcagcagaaaatggcaatttttgatcaaacatttatgattcatcatcatttgaaggaagcttttgagcgcaataattgttatccagatattgttttggattcgagttgttgggattttctgctaagtgcggtcaaaacaaacaaagaattattaactattctaccgttacctatggctgagctttatcattcaaaagaatttttgtgtcgtaaaatcgaaagtcctgttccgtggaaagtgacactatgtcgtcaaagaaaaacggtctacacacatcttgaagaatatatttttgataaattattagaggcttttaggccaacaaaatag

SEQ ID NO: 1626 - protein, 301 aa, Haemophilus influenzae
MMDIRHLRYFVSIVDNDFNLSRASQNLYVSQPALSMMITEFENRENIQIFKRASGKIIGLTFAGENYYRDAKEVIKRYNDMRTNLYKSKDCKKGTITIGIPPLVLSAVFSSVLPHLILKNPDINFIIKEIGAYALKSELLLDKVDLAVLLYPERISKNIIDSIEIHSSELALFLSPKHVLAKKQQITWADLHQQKMAIFDQTFMIHHHLKEAFERNNCYPDIVLDSSCWDFLLSAVKTNKELLTILPLPMAELYHSKEFLCRKIESPVPWKVTLCRQRKTVYTHLEEYIFDKLLEAFRPTK

SEQ ID NO: 1627 - DNA, 357 bp, Haemophilus influenzae
gtgttagtttttttattagctaaattttattggagctctggtctaatgcagaaccaaagaatccgtatccgcttaaaagctttcgatcaccgtttgatcgatcaatctactgcggagatcgtagaaacagctaaacgtactggcgcacaagttcgtggtccaattcctttaccaactcgtaaagagcgtttcaccgtgttgatttctccacacgtaaacaaagacgcacgtgaccaatacgaaattcgtactcacaaacgtttagtagatatcgtagagccaacagaaaaaactgttgatgcattaatgcgtttagatttggctgccggcgtggacgtgcagatcagcctaggttaa

SEQ ID NO: 1628 - protein, 118 aa, Haemophilus influenzae
MLVFLLAKFYWSSGLMQNQRIRIRLKAFDHRLIDQSTAEIVETAKRTGAQVRGPIPLPTRKERFTVLISPHVNKDARDQYEIRTHKRLVDIVEPTEKTVDALMRLDLAAGVDVQISLG

SEQ ID NO: 1629 - DNA, 627 bp, Haemophilus influenzae
atgattggtttagtcggtcgtaaagttggtatgacccgtatcttcaatgaagacggtgtttctgtaccagttaccgttatcgaaattgaagccaaccgcgtaactcaagttaaaactcttgaaaacgatggctatactgcagttcaagttactactggttctaaaaaagcgaatcgtgtaactaaacctgaagcaggtcatttcgtgaaagcaggtgttgaagctggtcgcggtttatgggaatttcgtactgaaggtgaagaattcactttaggtcaagaaatcaatgtagacatctttgcagatgttaaaaaagtagatgttactggtacttctaaaggtaaaggtttccaaggtggtgttaaacgttggaacttccgtactcaagatgctacacacggtaactctttatcacatcgtgtacttggttctattggtcaaaaccaaacaccaggtcgtgtgtttaaaggtaaaaaaatggcaggacatttaggtgctgagcgtgtaactgttcaatcacttgaagttgttcgtgtagatgctgagcgtaaattgctattagtaaaaggttctgtacctggtgctatcaatggcgatgttatcgttaagccggcagttaaagcataa

SEQ ID NO: 1630 - protein, 208 aa, Haemophilus influenzae
MIGLVGRKVGMTRIFNEDGVSVPVTVIEIEANRVTQVKTLENDGYTAVQVTTGSKKANRVTKPEAGHFVKAGVEAGRGLWEFRTEGEEFTLGQEINVDIFADVKKVDVTGTSKGKGFQGGVKRWNFRTQDATHGNSLSHRVLGSIGQNQTPGRVFKGKKMAGHLGAERVTVQSLEVVRVDAERKLLLVKGSVPGAINGDVIVKPAVKA

SEQ ID NO: 1631 - DNA, 603 bp, Haemophilus influenzae
atggaattacaagttgtaggtgcaaacgcactcactgtttctgaaactaccttcggacgtgagtttaacgaagcgttgatccaccaagttgttgttgcttatgcagcaggtgcacgtcaaggtactcgtgcgcaaaaaactcgtgctgaagtgtctggttcaggtaaaaaaccttggcgtcaaaaaggtacaggtcgtgctcgtgctggtgatattaaatcaccaatctggcgttctggtggtacaaccttcgcggctaaaccacaagatcacagccaaaaagtgaacaagaaaatgtaccgtggtgctatcaaaagcattctttctgaattagttcgtcaagaccgtttggttgtggtggaaaaatttgaattagatgcaccaaaaactaaagttttagtacaaaaattaaaagatttagccgttgaagatgcgttaattatcacagcaagtttagatgaaaatctattcttagccgcacgtaacttatataaagttgatgtacgtgatgttcaaggtatcgatccagttagcttgatcgctttcgataaggtgattgttactgttgatgctgtgaaacaaattgaggagatcctagcatga

SEQ ID NO: 1632 - protein, 200 aa, Haemophilus influenzae
MELQVVGANALTVSETTFGREFNEALIHQVVVAYAAGARQGTRAQKTRAEVSGSGKKPWRQKGTGRARAGDIKSPIWRSGGTTFAAKPQDHSQKVNKKMYRGAIKSILSELVRQDRLVVVEKFELDAPKTKVLVQKLKDLAVEDALIITASLDENLFLAARNLYKVDVRDVQGIDPVSLIAFDKVIVTVDAVKQIEEILA

SEQ ID NO: 1633 - DNA, 300 bp, Haemophilus influenzae
atgagtcaagaacgtttgctaagcgtgctacgtgcaccacatatctctgaaaaagcaactaacaatgctgaaaaatctaacactgttgtacttaaagttgctttagatgcgaacaaagctgaaattgctgctgcggtggctcaattatttgaagtaaaagtagattcagttcgtactgtggttgttaaaggtaaaactaaacgccgtggtaacaaaatgggtcgtcgcagcgactggaaaaaagcttatgtaactttagccgaaggccaaaacttggacttcgtggacagtgcagagtaa

SEQ ID NO: 1634 - protein, 99 aa, Haemophilus influenzae
MSQERLLSVLRAPHISEKATNNAEKSNTVVLKVALDANKAEIAAAVAQLFEVKVDSVRTVVVKGKTKRRGNKMGRRSDWKKAYVTLAEGQNLDFVDSAE

SEQ ID NO: 1635 - DNA, 822 bp, Haemophilus influenzae
atggctatcgttaaatgtaagccgacctccgctggtcgtcgtcacgttgttaaaatcgtgaaccctgaattacacaagggtaaaccttacgcacctcttctagatactaaatctaaaactggtggtcgtaacaactatggtcgtattactactcgtcacattggtggcggtcacaaacaacactaccgtttaatcgattttaaacgtaacaagttagacatccctgcggttgttgagcgtttagaatatgatccaaaccgttctgctaacattgctttagtgctttataaagatggtgaacgccgttatattttagcacctaaaggtttgtcagtaggcgatcaaatccaagctggcataaactcaccaattaaagtgggtaactcattaccaatgcgtaatatcccagttggttcaacagtacataacgttgaattaaaaccaggtaaaggcggtcaaatcgctcgttctgctggtgcttatgtacaaatcatcgcacgtgaaggcaactatgtaactttacgtttacgttctggcgaaatgcgtaaagtattagcggaatgtgttgctacaatcggtgaagttggtaactcagaacatatgcttcgcgtattgggtaaagctggtgctaaccgctggagaggtattcgccctacagttcgtggtactgcaatgaacccagtagatcacccacacggtggtggtgaaggtcgtaactttggtaaacacccagtaactccttggggcgttcaaactaaaggtaagaaaactcgtcacaacaaacgtactgataaatatatcgtacgtcgtcgtggcaaataa

SEQ ID NO: 1636 - protein, 273 aa, Haemophilus influenzae
MAIVKCKPTSAGRRHVVKIVNPELHKGKPYAPLLDTKSKTGGRNNYGRITTRHIGGGHKQHYRLIDFKRNKLDIPAVVERLEYDPNRSANIALVLYKDGERRYILAPKGLSVGDQIQAGINSPIKVGNSLPMRNIPVGSTVHNVELKPGKGGQIARSAGAYVQIIAREGNYVTLRLRSGEMRKVLAECVATIGEVGNSEHMLRVLGKAGANRWRGIRPTVRGTAMNPVDHPHGGGEGRNFGKHPVTPWGVQTKGKKTRHNKRTDKYIVRRRGK

SEQ ID NO: 1637 - DNA, 276 bp, Haemophilus influenzae
atgccacgttctctcaagaagggtcctttccttgacctacacttgttgaagaaggtagagaaggcggtggaaagcggggataaaaaaccaatcaaaacttggtcccgtcgttcaatgatcattccatcaatgatcggattgaccatcgcagtccataatggtcgtcagcacgttcctgtttatgtatctgatgaaatgatcggtcataagcttggtgaatttgcaccgactcgtacataccgcggtcacgcggcagataagaaagctaagaaataa

SEQ ID NO: 1638 - protein, 91 aa, Haemophilus influenzae
MPRSLKKGPFLDLHLLKKVEKAVESGDKKPIKTWSRRSMIIPSMIGLTIAVHNGRQHVPVYVSDEMIGHKLGEFAPTRTYRGHAADKKAKK

SEQ ID NO: 1639 - DNA, 333 bp, Haemophilus influenzae
atggaaactatcgcaaaacatcgttacgctcgcacttctgcccaaaaagctcgcttagttgccgatttaattcgtggtaaaaaagttgcgcaagcattagaaattttaactttcactaacaaaaaagcagcagctttagtgaagaaagttttagaatcagctattgcaaacgcagagcacaatgacggtgcagatattgatgatcttaaagttgctaaaatcttcgttgatgaaggtcctagcatgaaacgtgttatgccacgtgctaaaggtcgtgcagatcgtattttaaaacgtactagccacattactgtggttgtgtcagatcgttaa

SEQ ID NO: 1640 - protein, 110 aa, Haemophilus influenzae
METIAKHRYARTSAQKARLVADLIRGKKVAQALEILTFTNKKAAALVKKVLESAIANAEHNDGADIDDLKVAKIFVDEGPSMKRVMPRAKGRADRILKRTSHITVVVSDR

SEQ ID NO: 1641 - DNA, 708 bp, Haemophilus influenzae
atgggtcaaaaagtacatccacatggtattcgcctaggtattgttaaaccttggagctctacttggttcgcgaatacacaagacttcgctgacaatcttgaaggcgatttcaaagtacgcaaattcttaaataaagaattagcaaatgcttcagtttcacgtattactattgagcgtccagctaaaagtattcgtgtaactattcacacagctcgtcctggtatcgtaatcggtaaaaaaggcgaagatgttgaaaaattacgtaacgcagtgtctaaaatcgctggcgttcctgctcaaatcaacattgctgaagtgaaaaaacctgaattagatgcgaaattagttgcagatagcatcgcttctcaattagaacgtcgtgtaatgttccgtcgtgcaatgaaacgtgcggtacaaagtgctatgcgtttaggtgctaaaggtatcaaagttgaggttagcggtcgtttaggtggtgcagaaatcgcacgttcagaatggtatcgtgaaggtcgcgtacctctacatactcttcgtgcggacatcgattataacactgcagaagctcacacaacttacggcgtaatcggcgttaaagtgtggatcttcaaaggtgaaattcttggtggaatggctgccgttgcgcaatcagaacaacaacctgccgacaagcctaaaaaggctcctcgcggtaaaggtcgtaagtaa

SEQ ID NO: 1642 - protein, 235 aa, Haemophilus influenzae
MGQKVHPHGIRLGIVKPWSSTWFANTQDFADNLEGDFKVRKFLNKELANASVSRITIERPAKSIRVTIHTARPGIVIGKKGEDVEKLRNAVSKIAGVPAQINIAEVKKPELDAKLVADSIASQLERRVMFRRAMKRAVQSAMRLGAKGIKVEVSGRLGGAEIARSEWYREGRVPLHTLRADIDYNTAEAHTTYGVIGVKVWIFKGEILGGMAAVAQSEQQPADKPKKAPRGKGRK

SEQ ID NO: 1643 - DNA, 411 bp, Haemophilus influenzae
atgttgcaaccaaaacgtacaaaattccgtaaagttcacaaaggccgcaaccgtggtatcgcgagcggtactgaagttagtttcggtacttacggtttaaaagcagttggtcgttgtcgtttaaccgctcgtcaaatcgaagcggcacgtcgtgcaatgtcacgtgcagtaaaacgtcaaggtaaaatctggattcgtgtattcccagataaaccaattactgaaaaaccattagaagtccgtatgggtaaaggtaaaggtaacgttgagtactgggtagccttaatccaaccgggtaaagtgctttatgaaatggatggtgtgtctgaagaagtagcaagaaacgcatttgcattagcagctgctaaattgccagttaagaccactttcgtaactaagacggtgatgtaa

SEQ ID NO: 1644 - protein, 136 aa, Haemophilus influenzae
MLQPKRTKFRKVHKGRNRGIASGTEVSFGTYGLKAVGRCRLTARQIEAARRAMSRAVKRQGKIWIRVFPDKPITEKPLEVRMGKGKGNVEYWVALIQPGKVLYEMDGVSEEVARNAFALAAAKLPVKTTFVTKTVM

SEQ ID NO: 1645 - DNA, 192 bp, Haemophilus influenzae
atgaaagctcaagatttacgtacaaaaagtgttgaagagctgaatgctgaattagtaaaccttttaggtgaacaattcaagttgcgtatgcagacagccaccggtcagcttcaacaaacccatcaggctaaacaagtgcgtcgtgatattgcacgtgtaaaaactgtattaaccgaaaaggcgggtgagtaa

SEQ ID NO: 1646 - protein, 63 aa, Haemophilus influenzae
MKAQDLRTKSVEELNAELVNLLGEQFKLRMQTATGQLQQTHQAKQVRRDIARVKTVLTEKAGE

SEQ ID NO: 1647 - DNA, 258 bp, Haemophilus influenzae
atgactgataaaattcgtagcgtacaaggtaaagttgttagcgacaaaatggaaaaatctttcgttgttgctattgaacgtaaggtaaaacaccctttatatggtaaatttatccgtcgtacaactaaattacacgtacacgatgagaacaatgaagccaaagttggtgataccgtagagattcgcgaatgtcgccctctatcaaaaaccaaatcttggactttagttcgtgttgttgaaaaagcagttattgcttaa

SEQ ID NO: 1648 - protein, 85 aa, Haemophilus influenzae
MTDKIRSVQGKVVSDKMEKSFVVAIERKVKHPLYGKFIRRTTKLHVHDENNEAKVGDTVEIRECRPLSKTKSWTLVRVVEKAVIA

SEQ ID NO: 1649 - DNA, 351 bp, Haemophilus influenzae
atgatactttttatagagccagtgcttgataatataaatattcctaacaatgtttatagtacaaatatatttgctattcatcatgttgcaaagcatattttgggtattaaagatctagataaacgtttaaaatctggtgatattgaattagttcgtgaattaggagaagtaacaattggtggtaaggagaagtatttttactcttttgcaactaaatattgtagtcatcataatccaattgctttcccaatttatgatagctatgtggagcaagttctcctctattttaataaagtagataaattttcagcctttaaaaggaaagatttaaaaaaattacagaaaatttaa

SEQ ID NO: 1650 - protein, 116 aa, Haemophilus influenzae
MILFIEPVLDNINIPNNVYSTNIFAIHHVAKHILGIKDLDKRLKSGDIELVRELGEVTIGGKEKYFYSFATKYCSHHNPIAFPIYDSYVEQVLLYFNKVDKFSAFKRKDLKKLQKI

SEQ ID NO: 1651 - DNA, 372 bp, Haemophilus influenzae
atgatccaagaacagactatgctggatgttgctgataattcaggcgctcgcagcgtaatgtgtatcaaggttctaggtggatcgcaccgtcgttatgctgcgattggtgacatcatcaaaattactgtaaaagaagcaattccacgcggtaaagtaaaaaaaggtgatgtattaaaagcagttgttgtgcgcaccaagaagggtgttcgtcgcccagatggctcagttattcgtttcgatggtaacgcttgtgtaattttaaataataacactgagcaaccaatcggtactcgtatttttggaccagtgactcgtgaacttcgttctgagaaattcatgaagatcatttctttagctccagaagtactgtaa

SEQ ID NO: 1652 - protein, 123 aa, Haemophilus influenzae
MIQEQTMLDVADNSGARSVMCIKVLGGSHRRYAAIGDIIKITVKEAIPRGKVKKGDVLKAVVVRTKKGVRRPDGSVIRFDGNACVILNNNTEQPIGTRIFGPVTRELRSEKFMKIISLAPEVL

SEQ ID NO: 1653 - DNA, 312 bp, Haemophilus influenzae
atggctgctaaaatccgtcaaaatgatgaagtaattgttcttactggtaaagataagggcaaacgtggcaaggtaactaaagtgttaccaaacggtaaagtgtttgttgaaggtatcaacatcattactaaacatgaaaaaccagttcctgcattaggaaaggctggtggtttggtgaaaaaagaagctgcaattgacgcttcaaatgttgcgattttcaatcctaaaacaaataaagctgaccgtgtaggttttagattcgaagacggcaaaaaagtacgtttcttcaaatctaacaatgaaattatctaa

SEQ ID NO: 1654 - protein, 103 aa, Haemophilus influenzae
MAAKIRQNDEVIVLTGKDKGKRGKVTKVLPNGKVFVEGINIITKHEKPVPALGKAGGLVKKEAAIDASNVAIFNPKTNKADRVGFRFEDGKKVRFFKSNNEII

SEQ ID NO: 1655 - DNA, 540 bp, Haemophilus influenzae
atggcgaaactgcatgattactacagagatcaagtagtaagcgaattaaaaaataaattcggctacaaatctgtcatgcaagtcccacgaatcgaaaagattaccctgaatatgggtgtgggtgaagcattgaccgacaaaaaattgctagacaacgcagtagcggacttagcagcaatcagcggtcaaaaacctttagtaactaaagctcgtaaatctgttgctggctttaaaatccgtcagggatatccaatcggttgtaaagtaacactacgcggtgagcgtatgtgggagttctttgaacgtttaattacaattgctgttccacgtattcgtgacttccgcggtttaagtgcgaaatcattcgatggtcgtggtaactatagcatgggtgtgcgtgaacaaatcatcttccctgaaatcgattacgataaagtagatcgtgtacgtggtttagatatcactatcacaactactgctaagaatgatgaagaaggtcaagcactacttgctgcctttaatttcccattccgtaaataa

SEQ ID NO: 1656 - protein, 179 aa, Haemophilus influenzae
MAKLHDYYRDQVVSELKNKFGYKSVMQVPRIEKITLNMGVGEALTDKKLLDNAVADLAAISGQKPLVTKARKSVAGFKIRQGYPIGCKVTLRGERMWEFFERLITIAVPRIRDFRGLSAKSFDGRGNYSMGVREQIIFPEIDYDKVDRVRGLDITITTTAKNDEEGQALLAAFNFPFRK

SEQ ID NO: 1657 - DNA, 306 bp, Haemophilus influenzae
atggctaaacaatcaatgaaagcacgcgatgtaaaacgcgttaaattggctgaaaaattctacgcaaaacgtgttgaattaaagaaaatcatttctgatgtcaatgcctctgatgaagatcgttgggatgcagtgttaaagttacaaactttaccacgtgattctagcccatctcgtcaacgtaaccgttgccgccaaactggacgtcctcatggcgttttacgtaagtttggtttaagccgaattaaggttcgtgaagctgcaatgcgcggtgaaatcccaggccttaaaaaagcgagctggtaa

SEQ ID NO: 1658 - protein, 101 aa, Haemophilus influenzae
MAKQSMKARDVKRVKLAEKFYAKRVELKKIISDVNASDEDRWDAVLKLQTLPRDSSPSRQRNRCRQTGRPHGVLRKFGLSRIKVREAAMRGEIPGLKKASW

SEQ ID NO: 1659 - DNA, 393 bp, Haemophilus influenzae
atgagtatgcaagatccaatcgcagatatgctgacccgtattcgtaacggtcaagctgcgaacaaagttgcaatcaatatgccttcttccaagctaaaagtggcaattgccaacgtattagctgctgaaggttatatcgaaagcgtaaaagttttagaaggtgctaaacctgaattggaaattactttaaaatatttccaaggcaaaccagttgtagaaagcatccaacgtgtaagtcgtcctggtcttcgtatttacaaacgtaaagatgaattaccaaaagttatgggcggtttaggtgttgcagttatttctacatctaaaggtgttatgactgaccgtgctgctcgtcaagcaggtttaggcggtgagatcatctgttatgtagcttaa

SEQ ID NO: 1660 - protein, 130 aa, Haemophilus influenzae
MSMQDPIADMLTRIRNGQAANKVAINMPSSKLKVAIANVLAAEGYIESVKVLEGAKPELEITLKYFQGKPVVESIQRVSRPGLRIYKRKDELPKVMGGLGVAVISTSKGVMTDRAARQAGLGGEIICYVA

SEQ ID NO: 1661 - DNA, 534 bp, Haemophilus influenzae
atgtctcgtgttgcaaaggcacctgttaatattcctgccggcgttgaagttaaactcgacggtcagctattaacagtaaaaggtaaaaatggcgagttatctcgcaaaattcatgaatcagttgaagtaaaacaagataacggacaatttacgttcactccacgtgaaggttttgttgaagcaaatgctcaatcgggtactgcacgtgcattagttaatgcaatggttatcggcgttactgaaggtttcactaaaaaattagtattggtgggtgtaggttacagagctcaacttaaaggtaacgcaattgcattaagtttaggctattctcacccagtagagcacactttgccggtaggtattactgcagaatgtccatctcaaaccgaaatcgtgttgaaaggtgcagacaaacagttgatcggtcaagttgcagcagatattcgtgcttatcgccgtcctgagccttataaaggtaaaggggtacgttacgctgatgaagtggtacgtatcaaagaggctaagaagaaataa

SEQ ID NO: 1662 - protein, 177 aa, Haemophilus influenzae
MSRVAKAPVNIPAGVEVKLDGQLLTVKGKNGELSRKIHESVEVKQDNGQFTFTPREGFVEANAQSGTARALVNAMVIGVTEGFTKKLVLVGVGYRAQLKGNAIALSLGYSHPVEHTLPVGITAECPSQTEIVLKGADKQLIGQVAADIRAYRRPEPYKGKGVRYADEVVRIKEAKKK

SEQ ID NO: 1663 - DNA, 354 bp, Haemophilus influenzae
atggataagaaatcagctcgtatccgtcgtgcagctcgtgcacgtcatatgatgagagagcaaggtgtaactcgtttagttattcaccgcactccacgtcatatttatgcacaagttattgcaccaaacggttcagaagtgcttgccgctgcttcaactgttgagaaagcaattcgtgagcaagtaaaatacaccggtaataaagatgctgcagcagcagtaggtaaagctgttgcagaacgcgcattagcaaaaggcgttcaagctgttgcttttgatcgttccggttttaaatatcatggacgtgtccaaactttagcggacgctgcacgtgaagctggtctacagttctaa

SEQ ID NO: 1664 - protein, 117 aa, Haemophilus influenzae
MDKKSARIRRAARARHMMREQGVTRLVIHRTPRHIYAQVIAPNGSEVLAAASTVEKAIREQVKYTGNKDAAAAVGKAVAERALAKGVQAVAFDRSGFKYHGRVQTLADAAREAGLQF

SEQ ID NO: 1665 - DNA, 501 bp, Haemophilus influenzae
atgtcaaacatcgaaaaacaagttggtgaactgcaagagaagctaatcgcagtaaaccgtgtatcaaaaactgtaaaaggtggtcgtattatgagtttcactgcattaactgtggtgggcgatggtaatggccgagtaggttttggttatggtaaagctcgcgaagttccagcagcgatccaaaaagcgatggaaaaagcacgtcgcaatatgattaatgtcgctttaaatgaaggtacattacaacatccagttaaaggtgttcatactggttcacgtgtatttatgcagccagcaagtgaaggtacaggtatcatcgctggtggtgcaatgcgtgcggtattggaagttgcaggtgtacgtaacgttctttctaaagcgtatggttctaccaacccaattaacgttgttcgtgcaactattgatgcattagcaaatatgaaatcaccagaaatggttgctgcaaaacgcggtaaaactgttgatgaaatcttggggtaa

SEQ ID NO: 1666 - protein, 166 aa, Haemophilus influenzae
MSNIEKQVGELQEKLIAVNRVSKTVKGGRIMSFTALTVVGDGNGRVGFGYGKAREVPAAIQKAMEKARRNMINVALNEGTLQHPVKGVHTGSRVFMQPASEGTGIIAGGAMRAVLEVAGVRNVLSKAYGSTNPINVVRATIDALANMKSPEMVAAKRGKTVDEILG

SEQ ID NO: 1667 - DNA, 180 bp, Haemophilus influenzae
atggctaaaactattaaagtaacacaagttcgtagctcaattgctcgtttaccgaagcataaagctaccttgcgtggtcttggtcttcgccatatgcaccacactgttgagttaattgatacgcctgcagtacgtggtatgattaaccaagtttcatacatggttaaagtggaggagtaa

SEQ ID NO: 1668 - protein, 59 aa, Haemophilus influenzae
MAKTIKVTQVRSSIARLPKHKATLRGLGLRHMHHTVELIDTPAVRGMINQVSYMVKVEE

SEQ ID NO: 1669 - DNA, 435 bp, Haemophilus influenzae
atgcgtttaaatactctatctccggctgaaggtgcaaagcatagtgctaaacgcctcggtcgtggtattggttcaggtttaggcaagactggtggccgcggtcataaaggtcaaaaatctcgtactggtggcggtgttcgtcgcggtttcgaaggtggtcaaatgccgttataccgtcgtttaccaaaatttggttttacttcaatgaaatctgcagtgactgcagaagttcgtttaaatgaattaaccaaagttgaaggtaatgtagtaactttagaaacattaaaagcagcaaatatcttaactaaagatatccaattcgctaaagtaattttagcaggagaagtgaaatctgcagtaacggtacgcggtttacgtgtaactaaaggtgcaaaagcagcaattgaagctgctggcggttcaattgaggaataa

SEQ ID NO: 1670 - protein, 144 aa, Haemophilus influenzae
MRLNTLSPAEGAKHSAKRLGRGIGSGLGKTGGRGHKGQKSRTGGGVRRGFEGGQMPLYRRLPKFGFTSMKSAVTAEVRLNELTKVEGNVVTLETLKAANILTKDIQFAKVILAGEVKSAVTVRGLRVTKGAKAAIEAAGGSIEE

SEQ ID NO: 1671 - DNA, 1326 bp, Haemophilus influenzae
atggctaaacaaccaggttatcaagcaagaagtactaatagcggtaaaggtgaattaaaaagccgattacttttcgttttaggtgcacttatcgtttatcgaattggttcattcattccggttcctggtattgatgcggctgttctagctcaattagttgaacaacaaaaaggcactatcattgacatgtttaacatgttctctggtggtgctctaagccgtgcatccattttagcattaggaatcatgccatatatatcggcatctattgtaattcaattgcttgcaacggtttctcctgctttagcagaattaaagaaagaaggtgctgctggtcagcgtaaaatttctaaatatactcgttatgcgacagttgtttttgcaacgattcaggcagtagctatttcaacaggcttaccaaatatgttgtctggcttagtgccaaatgttggatttagtttttacttcacttcagttgttagtttagtcactgggacaatgttccttatgtggttgggtgagcaaataactgaaagaggtattggtaacggtatttcaattcttgtttttggcggtattgtagctggtttaccatcggctattcttcaaactattgagcaggctcgtcaaggacagatgcatccattagttcttcttctgatcgcagctattgtatttgcagtaacttattttgttgtttttgttgaaagaggacaacgtagaattcgcgttgaatatgcgaagcgtcagcaaggtcgtcaaattttaggtggtcattcaacacatttaccattgaaagtgaatatggcaaatgtaatgccagcaatttttgcttcaagtattattttattcccagctacattaacacaatggtttgggcaaaatgataaatttgaatggttaaataatttatcaatgttattgaatcctggtcaaccactttatttgcttgtttatgctgttgcaattattttcttcagctttttctatacagcaatgcaatataatcctcgtgatacagcagataatctaaaaaaatctggtgcatttattccaggaattagacccggtgaacaaacatcacgttatattgataaagtgatgactcgtcttacattaattggcggtctctatgtaacgtttgtatgtttagttccttatattatgacatcggcttgggatgttaaattttacttcggtggaacatctcttttaattgtagtcgttgtaattatggatttcatcgttcaggttcaaagtcatttaatgtcttctcaatatgaatctgcgttgaaaaaagcaaaccttaaaggttttggacaataa

SEQ ID NO: 1672 - protein, 441 aa, Haemophilus influenzae
MAKQPGYQARSTNSGKGELKSRLLFVLGALIVYRIGSFIPVPGIDAAVLAQLVEQQKGTIIDMFNMFSGGALSRASILALGIMPYISASIVIQLLATVSPALAELKKEGAAGQRKISKYTRYATVVFATIQAVAISTGLPNMLSGLVPNVGFSFYFTSVVSLVTGTMFLMWLGEQITERGIGNGISILVFGGIVAGLPSAILQTIEQARQGQMHPLVLLLIAAIVFAVTYFVVFVERGQRRIRVEYAKRQQGRQILGGHSTHLPLKVNMANVMPAIFASSIILFPATLTQWFGQNDKFEWLNNLSMLLNPGQPLYLLVYAVAIIFFSFFYTAMQYNPRDTADNLKKSGAFIPGIRPGEQTSRYIDKVMTRLTLIGGLYVTFVCLVPYIMTSAWDVKFYFGGTSLLIVVVVIMDFIVQVQSHLMSSQYESALKKANLKGFGQ

SEQ ID NO: 1673 - DNA, 114 bp, Haemophilus influenzae
atgaaagttcgtgcttccgtaaagaaaatgtgtcgtaactgtaagattgttaaacgtgagggtgttgtacgcgtattgtgtagcgaccctaaacacaaacaacgtcaaggttaa

SEQ ID NO: 1674 - protein, 37 aa, Haemophilus influenzae
MKVRASVKKMCRNCKIVKREGVVRVLCSDPKHKQRQG

SEQ ID NO: 1675 - DNA, 558 bp, Haemophilus influenzae
  misc_feature 532, 533, 534, 535, 536: n is any nucleotide
atgttgcgttttggcgttaatcaaaaaacatcatcattattattaaccgcacttttaagctgcggtttattaatattttcgcctgtcagccaatcttccgatctcaatcaaattcaaaaacaaattaagcaacaagaatctaaaatagagaagcaaaaacgtgagcaagctaagttacaagcaaatttaaaaaaacacgagagtaaaattaacagtgttgagggcgaactgcttgaaaccgaaataagtttaaaggaaattcgtaagcaaattgccgatgcagataagcaactcaaacaattagaaaaacaggaacgtgagcaaaaagcacgattagccaaacaaatagatataatttatcgttcaggcattaatccatcgctgattgaacgaatgtttgcccaagatccgacaaaagcagagcgaatgaaagtttattatcagcatttaaatcaagttcggattgaaatgattaataatttaaaagcaaacgcaggcacaaattgcagtacaaaaaaaggcgggtctctcnnnnncattcattcattaattaattaa

SEQ ID NO: 1676 - protein, 185 aa, Haemophilus influenzae
  VARIANT 178, 179: Xaa is any amino acid
MLRFGVNQKTSSLLLTALLSCGLLIFSPVSQSSDLNQIQKQIKQQESKIEKQKREQAKLQANLKKHESKINSVEGELLETEISLKEIRKQIADADKQLKQLEKQEREQKARLAKQIDIIYRSGINPSLIERMFAQDPTKAERMKVYYQHLNQVRIEMINNLKANAGTNCSTKKGGSLXXIHSLIN

SEQ ID NO: 1677 - DNA, 201 bp, Haemophilus influenzae
  misc_feature 178, 179, 180, 181, 182: n is any nucleotide
gtggcccgtattgcaggcattaacattcctgatcataaacacgctgtaatcgctttaactgccatttacggtattggtaaaactcgttcacaagctatttgtgcagcagcgggtattgctgaagatgttaagatcagagaattgtctgaagagcagattgacaaactgcgtgacgaannnnncattccattcattaattaa

SEQ ID NO: 1678 - protein, 66 aa, Haemophilus influenzae
  VARIANT 60, 61: Xaa is any amino acid
MARIAGINIPDHKHAVIALTAIYGIGKTRSQAICAAAGIAEDVKIRELSEEQIDKLRDEXXIPFIN

SEQ ID NO: 1679 - DNA, 291 bp, Haemophilus influenzae
atggaattagtatttatccgtcacggttttagtgaatggaatgcgaaaaacttattcacaggctggcgtgatgtgaatttaactgaacgtggtgtggaagaagcaaaagctgcgggtaaaaaactgttagacaaaggttatgaatttgatatcgcatttacctctgttttaactcgagcaatcaaaacttgtaacatcgtgttagaagaatcccatcaattatggattccacaagtaaaaaactggcgtttaaatgaacgtcattatggtgctttacaaaggtttagataa

SEQ ID NO: 1680 - protein, 96 aa, Haemophilus influenzae
MELVFIRHGFSEWNAKNLFTGWRDVNLTERGVEEAKAAGKKLLDKGYEFDIAFTSVLTRAIKTCNIVLEESHQLWIPQVKNWRLNERHYGALQRFR

SEQ ID NO: 1681 - DNA, 219 bp, Haemophilus influenzae
  misc_feature 4, 5, 6, 7, 8: n is any nucleotide
atgnnnnnattaattggcggtctctatgtaacgtttgtatgtttagttccttatattatgacatcggcttgggatgttaaattttacttcggtggaacatctcttttaattgtagtcgttgtaattatggatttcatcgttcaggttcaaagtcatttaatgtcttctcaatatgaatctgcgttgaaaaaagcaaaccttaaaggttttggacaataa

SEQ ID NO: 1682 - protein, 72 aa, Haemophilus influenzae
  VARIANT 2, 3: Xaa is any amino acid
MXXLIGGLYVTFVCLVPYIMTSAWDVKFYFGGTSLLIVVVVIMDFIVQVQSHLMSSQYESALKKANLKGFGQ

SEQ ID NO: 1683 - DNA, 114 bp, Haemophilus influenzae; identical to SEQ ID NO: 1673

SEQ ID NO: 1684 - protein, 37 aa, Haemophilus influenzae; identical to SEQ ID NO: 1674

SEQ ID NO: 1685 - DNA, 357 bp, Haemophilus influenzae
gtggcccgtattgcaggcattaacattcctgatcataaacacgctgtaatcgctttaactgccatttacggtattggtaaaactcgttcacaagctatttgtgcagcagcgggtattgctgaagatgttaagatcagagaattgtctgaagagcagattgacaaactgcgtgacgaagttggtaaatttaccgttgaaggtgacctacgtcgtgaagtaacactaaacatcaaacgtcttttagacttaggatgctatcgtggtttacgtcatcgtcgtagtttaccagtacgtggtcaacgtactaaaactaatgcgcgtacccgtaagggtccacgtaagccgatcaaaaaatag

SEQ ID NO: 1686 - protein, 118 aa, Haemophilus influenzae
MARIAGINIPDHKHAVIALTAIYGIGKTRSQAICAAAGIAEDVKIRELSEEQIDKLRDEVGKFTVEGDLRREVTLNIKRLLDLGCYRGLRHRRSLPVRGQRTKTNARTRKGPRKPIKK

SEQ ID NO: 1687 - DNA, 390 bp, Haemophilus influenzae
atggctaaaacaccagttcgtgcacgtaaacgtgtaaaaaaacaagttgtagatggcgtagcacatattcacgcatctttcaataatacaatcgttactattactgaccgtcaaggtaatgctctagcttgggcaactgcaggtggttcaggtttccgtggttctcgtaaatcaactccgttcgcagcgcaagttgcggcagagcgttgtgctgaaatcgttaaagaatttggcttaaagaacttggaagttatggttaaaggtccgggtccaggtcgtgaatctacaattcgtgcgttaaacgcagcgggtttccgtatcacgaatattactgatgtgactccgattcctcataacggttgtcgtccaccgaaaaaacgtcgtgtttaa

SEQ ID NO: 1688 - protein, 129 aa, Haemophilus influenzae
MAKTPVRARKRVKKQVVDGVAHIHASFNNTIVTITDRQGNALAWATAGGSGFRGSRKSTPFAAQVAAERCAEIVKEFGLKNLEVMVKGPGPGRESTIRALNAAGFRITNITDVTPIPHNGCRPPKKRRV

SEQ ID NO: 1689 - DNA, 375 bp, Haemophilus influenzae
atggcaagatatttgggtcctaaactcaagctcagccgtcgtgaaggcactgatttattccttaaatcaggcgtgcgtgcgattgattcaaaatgtaaaattgatacagcaccgggtcagcacggtgctcgtaaaccgcgtttgtctgactatggtagtcagttacgtgaaaaacaaaaagttcgtcgtatctatggtattttagaacgtcaattccgtaactactataaagaagcaaaccgtttgaaaggtaacactggtgaaaatttattagtgttattagaaggtagattggataacgttgtttatcgcatgggatttgctacaactcgcgcagaggctcgtcaattagtgagtcataaagcaattgtgtga

SEQ ID NO: 1690 - protein, 124 aa, Haemophilus influenzae
MARYLGPKLKLSRREGTDLFLKSGVRAIDSKCKIDTAPGQHGARKPRLSDYGSQLREKQKVRRIYGILERQFRNYYKEANRLKGNTGENLLVLLEGRLDNVVYRMGFATTRAEARQLVSHKAIV

SEQ ID NO: 1691 - DNA, 306 bp, Haemophilus influenzae
  misc_feature 4, 5, 6, 7, 8: n is any nucleotide
atgnnnnncgttactattactgaccgtcaaggtaatgctctagcttgggcaactgcaggtggttcaggtttccgtggttctcgtaaatcaactccgttcgcagcgcaagttgcggcagagcgttgtgctgaaatcgttaaagaatttggcttaaagaacttggaagttatggttaaaggtccgggtccaggtcgtgaatctacaattcgtgcgttaaacgcagcgggtttccgtatcacgaatattactgatgtgactccgattcctcataacggttgtcgtccaccgaaaaaacgtcgtgtttaa

SEQ ID NO: 1692 - protein, 101 aa, Haemophilus influenzae
  VARIANT 2, 3: Xaa is any amino acid
MXXVTITDRQGNALAWATAGGSGFRGSRKSTPFAAQVAAERCAEIVKEFGLKNLEVMVKGPGPGRESTIRALNAAGFRITNITDVTPIPHNGCRPPKKRRV

SEQ ID NO: 1693 - DNA, 621 bp, Haemophilus influenzae
atggcaagatatttgggtcctaaactcaagctcagccgtcgtgaaggcactgatttattccttaaatcaggcgtgcgtgcgattgattcaaaatgtaaaattgatacagcaccgggtcagcacggtgctcgtaaaccgcgtttgtctgactatggtagtcagttacgtgaaaaacaaaaagttcgtcgtatctatggtattttagaacgtcaattccgtaactactataaagaagcaaaccgtttgaaaggtaacactggtgaaaatttattagtgttattagaaggtagattggataacgttgtttatcgcatgggatttgctacaactcgcgcagaggctcgtcaattagtgagtcataaagcaattgttgtgaatggtcgtgttgttaatattccatctttccaagtttctgtaaatgatgtagttgctattcgtgaaaaatcgaaaaaacaagctcgtattaaagcatcattagaattagcagagcaaagagaaaaaccaacatggttagaagttgattctgcaaaaatggaaggtgtattcaaacgtgttcctgaacgttctgatttatcagcagacattaacgaacatctgatcgttgagctttactctaaataa

SEQ ID NO: 1694 - protein, 206 aa, Haemophilus influenzae
MARYLGPKLKLSRREGTDLFLKSGVRAIDSKCKIDTAPGQHGARKPRLSDYGSQLREKQKVRRIYGILERQFRNYYKEANRLKGNTGENLLVLLEGRLDNVVYRMGFATTRAEARQLVSHKAIVVNGRVVNIPSFQVSVNDVVAIREKSKKQARIKASLELAEQREKPTWLEVDSAKMEGVFKRVPERSDLSADINEHLIVELYSK

SEQ ID NO: 1695 - DNA, 987 bp, Haemophilus influenzae
atgcagggttctgttacagaatttttaaaaccacgtttagtagatattgaacaaattagttcaacacatgctaaagtgatcttagaaccgttagagcgtggttttggtcatactctaggtaatgcattgcgtcgtatccttctgtcttcaatgccaggttgtgctgtaactgaagtagaaattgatggcgtattgcatgaatatagtagtaaggaaggtgttcaagaagatattcttgaagtacttttgaaccttaaaggtctagcggttaaagtacagaataaagatgacgttattctgacattaaataaatctggaattggccctgttgttgcagcggacattacccatgatggtgatgttgaaattgtaaatccagatcatgtgatttgtcatttaactgatgaaaacgcttcaattagtatgcgtatacgtgttcagcgtggtagaggatatgttcctgcttcatctcgtacacatacgcaagaagaacgtccaattggtcgtttgcttgttgatgcttgttatagtccggttgaacgaattgcgtataatgtagaggcagctcgtgttgagcagcgtacagatttggataagctcgttattgagttagaaactaatggtgcacttgagccagaagaagcaattcgtcgtgcagcaacaatcttggcggagcaacttgatgcattcgttgatttacgtgatgttcgtcagcctgagattaaggaagaaaaaccggaatttgatccgattttattacgtcctgtagatgatttagagctgacagttcgttctgctaactgtttgaaagcagaaacaattcattatatcggtgatttagtgcaacgtactgaagtagaattattaaaaacccctaatcttggtaagaaatctcttactgaaattaaggatgttcttgcttctcgtggcttgtcacttggtatgcgccttgaaaattggccgccagcaagtattgctgaagactag

SEQ ID NO: 1696 - protein, 328 aa, Haemophilus influenzae
MQGSVTEFLKPRLVDIEQISSTHAKVILEPLERGFGHTLGNALRRILLSSMPGCAVTEVEIDGVLHEYSSKEGVQEDILEVLLNLKGLAVKVQNKDDVILTLNKSGIGPVVAADITHDGDVEIVNPDHVICHLTDENASISMRIRVQRGRGYVPASSRTHTQEERPIGRLLVDACYSPVERIAYNVEAARVEQRTDLDKLVIELETNGALEPEEAIRRAATILAEQLDAFVDLRDVRQPEIKEEKPEFDPILLRPVDDLELTVRSANCLKAETIHYIGDLVQRTEVELLKTPNLGKKSLTEIKDVLASRGLSLGMRLENWPPASIAED

SEQ ID NO: 1697 - DNA, 387 bp, Haemophilus influenzae
atgcgccatcgtaagagtggtcgtcaactaaaccgtaatagtagtcatcgtcaagcgatgttccgtaacttagcaagtgctttagttagtcatgaaatcattaagactactttacctaaagctaaagaattacgccgtgtagttgaaccgttaattacattagcaaaagtagatagcgttgctaaccgtcgtttagcattcgctcgtactcgcaacgttgaaactgttgcaaaattatttaatgaattaggtccacgttttgctcaacgtgcaggtggttacactcgcattttgaaatgtggtttccgtgcaggcgataatgcaccaatggcatacattgagttagttgatcgtccagaagttgctgaggcaacaactgaggaataa

SEQ ID NO: 1698 - protein, 128 aa, Haemophilus influenzae
MRHRKSGRQLNRNSSHRQAMFRNLASALVSHEIIKTTLPKAKELRRVVEPLITLAKVDSVANRRLAFARTRNVETVAKLFNELGPRFAQRAGGYTRILKCGFRAGDNAPMAYIELVDRPEVAEATTEE

SEQ ID NO: 1699 - DNA, 597 bp, Haemophilus influenzae
atgtttacattgccctattatctaccacaaaacttaaataaatgtattatttctgagagtaaaactctagaaaaaaacagcttaatttatgcacaaggcgagaagcctaaagaattttattttttaaaacaagggctagttggtctgtatcatagtctggaaaatggcaaagaaacattgactcgactttatcacgctaatgaatattttggttttcgtactatttttagtgaaacatcttatcattgcagtgcaaaagtattaatggaagccgatatagttagaatatttcctggtaatcacgcaaattttattgcaaataaccctgatttttcttgttatcttatgaaacaactttctaatgaattatatgatgcagaacaccgaataagtaatacagcttataagcgtagttacgaacgtattattgatgccattgaaaatttaactgaaagttatcccgattatccttggacctaccgagaagtagcggaattttgtggatgtgaaactgaaaccgcaattcgtattagtagagagcttaaaaaacaaggaattttagataaaaatacacgacatctacgaatatgctcttaa

SEQ ID NO: 1700 - protein, 198 aa, Haemophilus influenzae
MFTLPYYLPQNLNKCIISESKTLEKNSLIYAQGEKPKEFYFLKQGLVGLYHSLENGKETLTRLYHANEYFGFRTIFSETSYHCSAKVLMEADIVRIFPGNHANFIANNPDFSCYLMKQLSNELYDAEHRISNTAYKRSYERIIDAIENLTESYPDYPWTYREVAEFCGCETETAIRISRELKKQGILDKNTRHLRICS

SEQ ID NO: 1701 - DNA, 1083 bp, Haemophilus influenzae
atgaattcatttcaattaatggcaaaacctactggttcaatttgtaatttagattgtcaatattgcttttacttggaaaaacctcacttaaatcaacgggctatgactaatgaagtattagaagcctatatcaaatcctatattgaaacaacacctcaacaacaagttactttcctatggcaaggcggcgagccaaccctagcaggtcttgatttctacaaaagagcggtcaattttcagcataaatatgctaatggcaaacaaattgaaaattctctacaaacgaatggggtattacttaatgccgattggtgccgttttcttcacgatcatcacttccttgtaggactttctatagatgggcctaagcacttacacgatacctatcgtttaactaaaaatggcaaaggctcatttcaacaagtaatgaatgctctcgatttactctataattaccaagtttcttttaatacgctaactgtagtacataatcttaatgttcaatatgctaaagaaatctaccatttcttgaaaagaataggttcatcttatatgcaatttattccactaatgggcgattacaaacaacaagctacagcaaaagactacggtcaatttttaattaatatttttgatgaatggtataccaatgatatcggcaaaattggtattcaatttattgaacaatggtttatggcttaccttggtttacaaccaagtttatgtatttttcgtgaaacctgcggcgatcaattggttattgaacaaaatggcgatatttatagttgcgatcattatgtttatcctgaatataaactcggaaatcttattgaaatccctctaatacagctccttgataataatactaaacaaaagaattttggtgcagcgaaatcttttctttccgaacagtgtaaaatctgtaagtttcgctttgcatgtcacggaggatgtccaaaacatcgtacaattcaaggatttggtaaagcacataatcaactttgtgaggcatattattcagcactttctcatatggctccatatttaaagtcatttgcaaaatcatttggcaaaataaaataa

SEQ ID NO: 1702 - protein, 360 aa, Haemophilus influenzae
MNSFQLMAKPTGSICNLDCQYCFYLEKPHLNQRAMTNEVLEAYIKSYIETTPQQQVTFLWQGGEPTLAGLDFYKRAVNFQHKYANGKQIENSLQTNGVLLNADWCRFLHDHHFLVGLSIDGPKHLHDTYRLTKNGKGSFQQVMNALDLLYNYQVSFNTLTVVHNLNVQYAKEIYHFLKRIGSSYMQFIPLMGDYKQQATAKDYGQFLINIFDEWYTNDIGKIGIQFIEQWFMAYLGLQPSLCIFRETCGDQLVIEQNGDIYSCDHYVYPEYKLGNLIEIPLIQLLDNNTKQKNFGAAKSFLSEQCKICKFRFACHGGCPKHRTIQGFGKAHNQLCEAYYSALSHMAPYLKSFAKSFGKIK

SEQ ID NO: 1703 - DNA, 810 bp, Haemophilus influenzae
atggcgtttagtacaatttttatcttactgatttgcggtatttgtaccaatatggtttctgctatttttggtattggcggtggggtattgatggtaccaattttacgtacattgtttcccgcgttaccgattcaagttatttcagctacatcacttaccgtagtgatgtgtactgcattgattaatttattatttttccataagcaaaaaattaaaattgattatatcaatatgattttatggtctattgctatggtgattggcgtgcaaattggttttgaattaagtttttatttttctacagcaataattagtttaatttttacggttagtttgagtgcactagcaattaaaacatttttaaacagatcgagaacgcaaatagaagtggctaatatgtctcctatagaacgagctaaaggcagtattagttgttgtggaggaggcttaattgcgggtattacaggtattggaggcggttctattcttgctccgcttgttggccaattaaagggggtaaaaacgcagcaaattgccgtttatacgaactacatgatgattattggtgggattggtaatttatatggctatctcacaagagtcttcccttatgatgtcagtctaagtggccaattaggatatgtaaattttcttgtagttggtgtcgttaccttgggttcatttgtaatgagtttcttctcaatgaaattgcgtggattaatgaatccggctttaacaagaaaattattggcgattattttattttgtattgcagcctatatgtgcattttggaatttgtattccattaa

SEQ ID NO: 1704 - protein, 269 aa, Haemophilus influenzae
MAFSTIFILLICGICTNMVSAIFGIGGGVLMVPILRTLFPALPIQVISATSLTVVMCTALINLLFFHKQKIKIDYINMILWSIAMVIGVQIGFELSFYFSTAIISLIFTVSLSALAIKTFLNRSRTQIEVANMSPIERAKGSISCCGGGLIAGITGIGGGSILAPLVGQLKGVKTQQIAVYTNYMMIIGGIGNLYGYLTRVFPYDVSLSGQLGYVNFLVVGVVTLGSFVMSFFSMKLRGLMNPALTRKLLAIILFCIAAYMCILEFVFH

SEQ ID NO: 1705 - DNA, 1194 bp, Haemophilus influenzae
atgcaaaaacaaaacattgtcattcttggttcaacgggatcaatcggtaagagtaccctttctgttattgaaaataaccctcagaaatatcatgcatttgcactcgtaggcggaaaaaatgtagaaacaatgtttgaacaatgtatcaaattccgaccgcactttgcggctcttgatgatgtaaatgcggctaaaattttacgtgaaaaattaattgcgcatcatactccaacggaagtattagccggacaacaagctatttgcgaactcgctgcacacccagatgccgatcagataatggcatcgattgttggtgccgcaggattgttaccgactctttcagcggttaaagcgggtaaacgggtattactggcaaataaagaatcactggtaacctgcggacagctttttattgatgctgtaaaaaactatggcgcgaagcttttaccagtagatagtgaacataatgctatctttcaatcattaccgccagaagcacaagaaaaaattggtttttgcccactttctgaattaggtgtaagtaaaattatactcactggttctggcggaccattccgttacacgccacttgaacaattcaccaacataacaccagaacaagcggttgcgcaccctaattggtctatgggtaaaaaaatctctgtcgattcagctacaatgatgaataagggcttggaatacattgaggctcgctggcttttcaacgcaagtgcggaagaaatggaagtcattattcatccacaatctattatccattctatggtacggtatgttgatggctcagtcatagctcaaatgggaaacccagatatgcgtacaccaattgcagaaactatggcatatcctcaccgcacttttgctggagtagaaccactcgatttctttaaaatcaaagaactgacatttattgaacctgattttaatcgctatccgaatttaaaactggctattgatgccttcgctgtgggtcaatatgcgacaacagcaatgaatgcagctaatgaaattgccgtacaagcatttttagatcgtcaaattagttttatggatattgcaaaaattaatttgaaaacaattgagaaaatttcgccttataccattcaaaatattgatgatgtactcgaaattgatgcacaagcaagagagattgcgaaaacactaattagagaatag

SEQ ID NO: 1706 - protein, 397 aa, Haemophilus influenzae
MQKQNIVILGSTGSIGKSTLSVIENNPQKYHAFALVGGKNVETMFEQCIKFRPHFAALDDVNAAKILREKLIAHHTPTEVLAGQQAICELAAHPDADQIMASIVGAAGLLPTLSAVKAGKRVLLANKESLVTCGQLFIDAVKNYGAKLLPVDSEHNAIFQSLPPEAQEKIGFCPLSELGVSKIILTGSGGPFRYTPLEQFTNITPEQAVAHPNWSMGKKISVDSATMMNKGLEYIEARWLFNASAEEMEVIIHPQSIIHSMVRYVDGSVIAQMGNPDMRTPIAETMAYPHRTFAGVEPLDFFKIKELTFIEPDFNRYPNLKLAIDAFAVGQYATTAMNAANEIAVQAFLDRQISFMDIAKINLKTIEKISPYTIQNIDDVLEIDAQAREIAKTLIRE

SEQ ID NO: 1707 - DNA, 558 bp, Haemophilus influenzae
atgcttaaccaaattaaaaaagatgctcaagatcgtatggaaaaaagccttgaagcattaaaaggtcatatttcaaaaattcgtactggtcgtgctcaaccgagtttacttgatgcaattcaagttgaatattacggtgcagcaacgccacttcgccaattagcaaacgtagtggcagaagatgcgcgtactttagccgtaactgtttttgatcgttctttaatctctgcggtagaaaaagcaattttaacctcagatttaggtttaaacccatcttcagcgggtaccacaatccgtgttccgcttccgccattaacagaagaacgtcgtcgcgatttaatcaagatcgtaaaaggcgaaggtgaacaaggtaaagttgcgattcgtaatgtgcgtcgtgatgcgaatgataaaatcaaagcattattaaaagacaaagaaatcagcgaaaacgaacaacataaagcagaagaagaaatccaaaaaatcacagatatttacattaaaaaagtagatgaagtattagcggataaagaaaaagaattaatggatttctaa

SEQ ID NO: 1708 - protein, 185 aa, Haemophilus influenzae
MLNQIKKDAQDRMEKSLEALKGHISKIRTGRAQPSLLDAIQVEYYGAATPLRQLANVVAEDARTLAVTVFDRSLISAVEKAILTSDLGLNPSSAGTTIRVPLPPLTEERRRDLIKIVKGEGEQGKVAIRNVRRDANDKIKALLKDKEISENEQHKAEEEIQKITDIYIKKVDEVLADKEKELMDF

SEQ ID NO: 1709 - DNA, 1263 bp, Haemophilus influenzae
  misc_feature 4, 5, 6, 7, 8: n is any nucleotide
atgnnnnntttctgtggtgcgagcgaacacgaccgtattgcagtacgtattgtcactgaagtagcgtggcaagcacattttgtaaaaaatatgtttattcgcccaactgaagaacaactcaaaaattttgaaccagatttcgttgtaatgaacggttctaaagtaaccaatccaaactggaaagaacaaggtttaaattcagaaaactttgttgctttcaacttgactgaacgcattcaattaatcggcggtacttggtacggcggcgaaatgaaaaaaggtatgttctcaatgatgaactacttcctacctctcaaaggtgttggtgcaatgcactgctcagctaacgttggtaaagatggtgatgtagcaatcttcttcggcttatctggcacaggtaaaacaaccctttcaacggatccaaaacgtgaattaatcggtgacgatgaacacggttgggatgatgttggtatctttaactttgaaggtggttgttatgcgaaaaccattcatctttcagaagaaaatgaaccagatatttaccacgctatccgtcgcgacgcattattagaaaacgtggttgttcgttcagatggttctgttgatttcgatgatggttcaaaaacagaaaatactcgcgtgtcttacccaatttatcacatcgataacattgtaaaaccagtttctcgtgcaggtcacgcaactaaagtgattttcttaactgcagatgcgtttggtgtattacctccagtatctaaattgacaccagaacaaactaaatactacttcttatctggtttcacagcgaaattagcagggactgaacgtggtattactgaaccaacgccaactttctcagcatgtttcggtgcagcatttttaacgcttcatccaactcaatatgcagaagtgttagtaaaacgtatgcaagcagcaggtgctgaagcttacttagtaaatactggttggaatggcacaggcaaacgtatctcaatcaaagatactcgcggaatcattgatgcaatcttagatggctcaattgaaaaagctgaaatgggcgaattgccaatcttcaacttagccattcctaaagcattaccaggtgtagattctgcaatcttagatcctcgcgatacttacgcagataaagcacaatggcaatcaaaagctgaagacttagcaggtcgttttgtgaaaaactttgttaaatatgcaactaacgaagaaggcaaagctttaattgcagctggtcctaaagcttaa

SEQ ID NO: 1710 - protein, 420 aa, Haemophilus influenzae
  VARIANT 2, 3: Xaa is any amino acid
MXXFCGASEHDRIAVRIVTEVAWQAHFVKNMFIRPTEEQLKNFEPDFVVMNGSKVTNPNWKEQGLNSENFVAFNLTERIQLIGGTWYGGEMKKGMFSMMNYFLPLKGVGAMHCSANVGKDGDVAIFFGLSGTGKTTLSTDPKRELIGDDEHGWDDVGIFNFEGGCYAKTIHLSEENEPDIYHAIRRDALLENVVVRSDGSVDFDDGSKTENTRVSYPIYHIDNIVKPVSRAGHATKVIFLTADAFGVLPPVSKLTPEQTKYYFLSGFTAKLAGTERGITEPTPTFSACFGAAFLTLHPTQYAEVLVKRMQAAGAEAYLVNTGWNGTGKRISIKDTRGIIDAILDGSIEKAEMGELPIFNLAIPKALPGVDSAILDPRDTYADKAQWQSKAEDLAGRFVKNFVKYATNEEGKALIAAGPKA

SEQ ID NO: 1711 - DNA, 882 bp, Haemophilus influenzae
atgaccaatcaacaagactatactcaagacaatgacaaactttaccgttatcttttccaacatcgtgcagttcgtggagaatgggttcgcttaaataaaacatttactgatacattaaatacccatcagtatcctaaagcagtacaagatttattgggtgaaatgatggtggcgaccaatttactcactgccacactaaaatttgacggcaatatcaccgtacaaattcaaggcgatggtccattacgcttagcattagtaaatggcaatgatcaacaacaaatccgcgcccttgctcgagtggatggtaacatcactgaaaatatgagtctgcataatatgattggtaaaggcgtattggtcattactattgcaccaaaagaaggcgaacgctatcaaggtgtaattagcttggataaacccacgatcacagaatgcttagaagattattttgtacgctcagaacagcttcaaactcaattaattattcgtactggagaatatgaaggcaagccagtggcagcaggtatgttattacaaattatgcctgatggttctggtacaccagaagattttgagcatttaactacgctcgcagcaacagtaaaagatgaagaattatttggtctccctgcagaagagttactctatcgtttatatcacgaagaaaccatcaatctttatccagcacaagatgtacaatttttctgtggctgctctgctgagcgttctggttctgcattactgctcatctccgatgaagaaattgacgaaatattagccgaacataaaggcagtattgatatgcaatgtgagtgttgtggcacacactacttctttaataaagaagcgattgaaaaattaaaatcaacaagagtttaa

SEQ ID NO: 1712 - protein, 293 aa, Haemophilus influenzae
MTNQQDYTQDNDKLYRYLFQHRAVRGEWVRLNKTFTDTLNTHQYPKAVQDLLGEMMVATNLLTATLKFDGNITVQIQGDGPLRLALVNGNDQQQIRALARVDGNITENMSLHNMIGKGVLVITIAPKEGERYQGVISLDKPTITECLEDYFVRSEQLQTQLIIRTGEYEGKPVAAGMLLQIMPDGSGTPEDFEHLTTLAATVKDEELFGLPAEELLYRLYHEETINLYPAQDVQFFCGCSAERSGSALLLISDEEIDEILAEHKGSIDMQCECCGTHYFFNKEAIEKLKSTRV

SEQ ID NO: 1713 - DNA, 102 bp, Haemophilus influenzae
gtgccacctatttataagcaaaaacacttaaataaaacgatcaagacaaaaagtgcggaaaaaaccaccgcactttttatctcaattaggaataatcaatga

SEQ ID NO: 1714 - protein, 33 aa, Haemophilus influenzae
MPPIYKQKHLNKTIKTKSAEKTTALFISIRNNQ

SEQ ID NO: 1715 - DNA, 1374 bp, Haemophilus influenzae
atggcactttggggtgggcgttttacacaagccgcagataagcgttttaaagattttaatgattcattacggtttgattaccgtttggcagaacaggatattcaaggctcgattggttggtccaaagccttggtgaaagtgaatgtattaactatcgaagaacagcatcaacttgagcaagcactaaatgaattacttgttgaagtgcggtcaaatccgcaagcaattttacaagatgatgctgaagatattcatagttgggttgagagtaagctaattgataaagtaggcaaccttggtaaaaaattacatactggtcgtagccgtaacgatcaagtggcagtagatataaaactatggtgcaaacaacgtgtggttgaattacaagaatccgtgcgtaatttgcaacgccacttagttcaaaccgcagaaaacacacaacaagcagtaatgccgggctacacccatttacaacgagctcaaccaataacttttgcccattggtgtatggcatatgtggaaatgttcgaccgcgactattcacgtttaacagatgcgtataatcgtatgaatacttgtccacttggtagtggtgcgctggctggtacggcttatgctgtagatcgtgattcacttgcgcacgatcttagttttgctttcgcaactagaaatagcttagatagcgtctctgatcgcgatcatatcgtagaattactttctatcgcctctcttagtatggcacatctttcccgctttgctgaagatatgattatctttaacagcggagaagcaaatttcgtggaactatccgatcgtgtgacttctggttcatcattaatgccacaaaagaaaaatcctgatgcttgtgagttaattcggggcaaaacgggtagagtaattggttcattaacatctatgttaatcacattaaaaggcttgcctcttgcgtataataaagatatgcaagaagacaaagagggtatttttgatgccttagatacttggcaaaactgtgtggatatggcaacgttcgtcttagatgaattgaaagtaaatgttgaacgtactcgtgaagctgcgttaaaaggctattcaaacgcaacggaattagcagattatttagtctcgaaaggtgtgcctttccgagattcccatcatatcgtaggcgaaacagtggtttatgcaatcgagaaaggcaaaggattagaagatcttactatccctgaattccgccaatttagtgaagtagtgggagatgacgtttacgagattctttctctccaatcttgcttagacaaacgttgtgcaaaaggtggcgtatcgccattgcgtgttgccgaagctattgcagaagccaaaacaagatttgcttaa

SEQ ID NO: 1716 - protein, 457 aa, Haemophilus influenzae
MALWGGRFTQAADKRFKDFNDSLRFDYRLAEQDIQGSIGWSKALVKVNVLTIEEQHQLEQALNELLVEVRSNPQAILQDDAEDIHSWVESKLIDKVGNLGKKLHTGRSRNDQVAVDIKLWCKQRVVELQESVRNLQRHLVQTAENTQQAVMPGYTHLQRAQPITFAHWCMAYVEMFDRDYSRLTDAYNRMNTCPLGSGALAGTAYAVDRDSLAHDLSFAFATRNSLDSVSDRDHIVELLSIASLSMAHLSRFAEDMIIFNSGEANFVELSDRVTSGSSLMPQKKNPDACELIRGKTGRVIGSLTSMLITLKGLPLAYNKDMQEDKEGIFDALDTWQNCVDMATFVLDELKVNVERTREAALKGYSNATELADYLVSKGVPFRDSHHIVGETVVYAIEKGKGLEDLTIPEFRQFSEVVGDDVYEILSLQSCLDKRCAKGGVSPLRVAEAIAEAKTRFA

SEQ ID NO: 1717 - DNA, 888 bp, Haemophilus influenzae
atgaaagcaattattcctgtcgccggtcttggcacacgtatgttgcccgccacgaaggcgattccgaaggaaatgctcactttggtggataaaccgttaattcaatacgtggtaaatgaatgtgtagctgctggcataaaagaaattgtgctggtaacacattcatcaaaaaatgctatcgaaaaccattttgatacctcttttgaattagaaacgatgctggaaaaacgtgtgaagcgtcagcttctagaagaagttcgttctatctgtccaaaaaatgtaaccattatgcacgttcgtcaaggtaatgcgaaaggtttaggtcacgccgtgttatgcggtcgtcctttagtaggaaatgaatcttttgccgttatgttaccagatgtattattagctgaatttagtgcagatcagaaaaaagaaaatcttgctgcaatgattcaacgctttaatgaaactggcgcaagccaaattatggtaaccccagttccgcaagaaaatgtgagtagctatggtgttgcagattgtggtggcattgagcttaatggcggcgaaagtgcaaaaattaatagtattgttgaaaaaccttctattgaagacgcaccatcaaatcttgctgtggttgggcgttatgttttttcagcagcaatttgggatttgttagaaaaaacaccaattggtgttggcgatgaaatccaattaaccgatgctattgatatgctaattgaaaaagaaaccgttgaagcatttcatatgacaggggaaacttttgattgtggcgataaaattggttatatggaagctttcgtagaatatggtattcgtcacgaaaaattaggtaaagaatttaaatcctttatcaaaaatttggcaaaaacgctataa

SEQ ID NO: 1718 - protein, 295 aa, Haemophilus influenzae
MKAIIPVAGLGTRMLPATKAIPKEMLTLVDKPLIQYVVNECVAAGIKEIVLVTHSSKNAIENHFDTSFELETMLEKRVKRQLLEEVRSICPKNVTIMHVRQGNAKGLGHAVLCGRPLVGNESFAVMLPDVLLAEFSADQKKENLAAMIQRFNETGASQIMVTPVPQENVSSYGVADCGGIELNGGESAKINSIVEKPSIEDAPSNLAVVGRYVFSAAIWDLLEKTPIGVGDEIQLTDAIDMLIEKETVEAFHMTGETFDCGDKIGYMEAFVEYGIRHEKLGKEFKSFIKNLAKTL

SEQ ID NO: 1719 - DNA, 192 bp, Haemophilus influenzae
atgttaatcttaactcgtaaagttggcgaaagtgtacttattggagatgatatttctatcacggttttgagtgtacgtggaaaccaagttaaactcggtgttgaagcgcctaaagaagtatccgttcaccgagaagaaatttaccaacgaattaaacaaacgaaagatgaaccctatttaggttcctcttag

SEQ ID NO: 1720 - protein, 63 aa, Haemophilus influenzae
MLILTRKVGESVLIGDDISITVLSVRGNQVKLGVEAPKEVSVHREEIYQRIKQTKDEPYLGSS

SEQ ID NO: 1721 - DNA, 2625 bp, Haemophilus influenzae
atgaaaacaacagcagaaataagacaatcattccttgattttttccatagcaaaggccaccaagtagttgagagtagctcacttgtgccggaaaatgatccgactttgcttttcacgaacgctgggatgaaccaatttaaggacgtgttccttggaatggataaacgcccttattctagagccaccaccgcgcaacgttgcgtacgtgctggtggtaagcataacgacttagaaaatgttggttatactgcacgtcaccatactttctttgaaatgctcggtaacttcagttttggtgattactttaaacaggatgccattaattttgcttgggaatatttaacttctccacaatggcttggtttacctaaagaaaaactctgggtaaccgtgtatgaaactgacgacgaagcctataatatttggaataaagatgttggtgttcctgctgaacgcattattcgcattggtgacaataaaggtgcaccttacgcatcagacaacttctgggcaatgggcgatacaggtccttgcggtccttgtactgaaattttctacgatcacggcgatcatatttggggcgggcctccaggctcaccagaagaagatggcgaccgttatattgaaatctggaacgttgtgtttatgcagttcaaccgtttagccgatggcacaatggaaaaattacctcgtccgtctgttgatacaggtatgggtttagagcgtatttctgctgtgttgcaacatgtgaactcaaactacgagattgatattttcaaaacattaatcgcaaaaacggcggaaattgtaggcgcaacagatttaactaacaaatcactacgtgttattgctgaccatattcgttcttgtgcatatttaatcgccgatggcgttatcccatcaaatgaagggcgtggttatgtcttacgtcgtattattcgccgtgcagttcgtcacggtcacctattaggtgccaaagaatcctttttctataaactcgtgccaactctaattgatgtaatggctgaagctggaaaagatgtaaaagcaaaacaaacaaatgttgaaaaactattacgtctagaagaagaacaatttgctcgcactctagaacgtgggttgagcttattagatgaagccctttctcaagtgaaagatggcattctttcaggtgaagttgcattcaaactttatgatacttatggtttcccattggatttaacggctgatgtatgccgtgagcgtaacattactattgatgaacaagcgtttgaccgtgaaatggaagcacaacgtactcgtgctcaagcagcgagccagtttggtgtggactacaacagcgttattcgtgtagatggcgaaactaagtttgaaggctatactgaagtagaatctcaggcaaaaattaccgcacttttctatgatggtaaatcagtggaaagtatcgaagcaggtcaaagtgcggtcgttattttagaaaatacgccattttatgcagaatcaggtggtcagattggcgatagcggatatttaagcgcacaaggtgtaacctttaatgtgaaagatacccaaaaatatgggcaagtatttggacacattggggaattaacgcaaggaagtttaaaagttggacaatcagtgaatgcgattgtggacgctaaacgtcgccacaacacatcactcaatcactcagcgacacacttattgcacgctgccttacgtcaaattctaggtttacacgttgtgcaaaaaggttcgcttgtttcagataaagccttacgttttgactttgcgcaaccagaagccattaccaaagagcaattgagtgaaattgaaacattagtaaaccaaaaaatccgcgctaactttccagttcaaacggatattatggatattaattccgcaaaagcgaaaggagcaatggctctctttggcgaaaaatatggcgataaggttcgtgtattaacgatgggcgatttctcaattgagctgtgtggcggtattcacgcaaaacgcacaggcgatattggtttatttaaaattattactgaaaacgcagtggctgcaggcattcgtcgtattgaagctgtaacaggtcaaaatgccattgactggttacataatcaacaacgcattctgacccaaagcgcagacttattaaaatcagacgtaaataccttagtggaaaaaatccaacaacttcaagacaaaacgaagaaagtggaaaaagaattacaagctctaaaagaaaaagccgcaatgcaggctggttctgattttgtaaaaagtgcggtcaaaatcaacggtgtttctgttattgcacaacaattagatggtatagaaacaaaatcattacgcgtaatggtcgatgatttaaaaaatcaactcggatcaggcgtaattgcatttgcatcaatattagatgaaaaagttaatctcgtcgttggagtgacaaatgatttaaccgccaaaataaaagctggagaacttgttaatttaatggctcaacaagttggaggaaaaggcggtggtcgtccagatatggcaatggcaggaggttcccaaccagaaaatgtggcacaagcaattaaagtggcacaagactggttaaacaaaaatctgtag

SEQ ID NO: 1722 - protein, 874 aa, Haemophilus influenzae
MKTTAEIRQSFLDFFHSKGHQVVESSSLVPENDPTLLFTNAGMNQFKDVFLGMDKRPYSRATTAQRCVRAGGKHNDLENVGYTARHHTFFEMLGNFSFGDYFKQDAINFAWEYLTSPQWLGLPKEKLWVTVYETDDEAYNIWNKDVGVPAERIIRIGDNKGAPYASDNFWAMGDTGPCGPCTEIFYDHGDHIWGGPPGSPEEDGDRYIEIWNVVFMQFNRLADGTMEKLPRPSVDTGMGLERISAVLQHVNSNYEIDIFKTLIAKTAEIVGATDLTNKSLRVIADHIRSCAYLIADGVIPSNEGRGYVLRRIIRRAVRHGHLLGAKESFFYKLVPTLIDVMAEAGKDVKAKQTNVEKLLRLEEEQFARTLERGLSLLDEALSQVKDGILSGEVAFKLYDTYGFPLDLTADVCRERNITIDEQAFDREMEAQRTRAQAASQFGVDYNSVIRVDGETKFEGYTEVESQAKITALFYDGKSVESIEAGQSAVVILENTPFYAESGGQIGDSGYLSAQGVTFNVKDTQKYGQVFGHIGELTQGSLKVGQSVNAIVDAKRRHNTSLNHSATHLLHAALRQILGLHVVQKGSLVSDKALRFDFAQPEAITKEQLSEIETLVNQKIRANFPVQTDIMDINSAKAKGAMALFGEKYGDKVRVLTMGDFSIELCGGIHAKRTGDIGLFKIITENAVAAGIRRIEAVTGQNAIDWLHNQQRILTQSADLLKSDVNTLVEKIQQLQDKTKKVEKELQALKEKAAMQAGSDFVKSAVKINGVSVIAQQLDGIETKSLRVMVDDLKNQLGSGVIAFASILDEKVNLVVGVTNDLTAKIKAGELVNLMAQQVGGKGGGRPDMAMAGGSQPENVAQAIKVAQDWLNKNL

SEQ ID NO: 1723 - DNA, 426 bp, Haemophilus influenzae
atgtacaaacacattttagtagcagtagatctttctgaagaaagtccagttttacttaaaaaagcagttgggattgctaaacgccacgacgcaaaactttctatcatccacgttgatgtgaacttttcggatctttatactggattgattgatgtgaatatgtcttcaatgcaagacaggatttccacggaaacacaaaaagccttattagatttagctgaaagtgtggattatccaatttcagaaaaattgagtggcagcggcgatttaggacaagttttaagtgatgccatcgaacaatatgatgtggatttattagtgacgggacatcatcaggatttttggagtaagttaatgtcttcaacacgtcaagtgatgaatacgattaaaattgatatgttggttgttccacttagagatgaataa

SEQ ID NO: 1724 - protein, 141 aa, Haemophilus influenzae
MYKHILVAVDLSEESPVLLKKAVGIAKRHDAKLSIIHVDVNFSDLYTGLIDVNMSSMQDRISTETQKALLDLAESVDYPISEKLSGSGDLGQVLSDAIEQYDVDLLVTGHHQDFWSKLMSSTRQVMNTIKIDMLVVPLRDE

SEQ ID NO: 1725 - DNA, 1170 bp, Haemophilus influenzae
  misc_feature 1152, 1153, 1154, 1155, 1156: n is any nucleotide
ttgcctaaagaagaatttgaggaacgtcgcacacgagtattcgctcaaatgcaacctaattcagcattattgcttttttctgaaatcgaaaaacgccgtaataatgattgtacctatcctttccgtcaagatagctatttttggtatttaacaggctttaatgaaccgaatgctgctctgttattactgaaaacagaacaagcagaaaaagccattatttttcttcgtccacgcgatccgttacttgaaacgtggaatggtcgccgattaggtgttgagcgtgcaccacagcaacttaatgtaaatgaagcctattctattgaagaattcgctaccgtactgccaaaaatactgaaaaatttgaccgcactttaccatgtgccagaaattcatacttggggtgatacattggtgtcagaaagtgcggtgaattttagcgagattttagattggcgaccaatgctcagcgaaatgcgccttataaaatcgccgaatgaaatccgcttaatacaacaagcgggacaaattacggcacttgggcatattaaagcgatgcaaacaacacgcccaaatcgctttgaatatgaaattgaaagcgatattttgcatgaatttaatcgccattgcgccagatttccttcttacaattccattgttgcagggggaagtaacgcctgtattttgcactacacagaaaatgatcgtccattaaatgatggggatttagtgctgattgacgctggctgtgaatttgccatgtatgcaggcgatatcacccgcacttttcctgtaaatggaaaatttagccagcctcaacgtgaaatttacgagttagttttaaaagcacaaaaacgtgcgattgaattacttgtacctggcaattccattaagcaagccaatgatgaagttattcgtattaaaacccaaggattagtggatttaggtatcttgaaaggagatgtggatacacttattgaacaacaagcttatcgccaattttatatgcacggattagggcactggctaggtttagatgtgcatgatgtgggtagttatggccaagataaacaacggatactcgaaatcggcatggtaattaccgttgagcctggtatttatatttcagaagatgctgatgtgccagagcaatannnnncattcattcattaa

SEQ ID NO: 1726 - protein, 389 aa, Haemophilus influenzae
  VARIANT 384, 385, 386: Xaa is any amino acid
MPKEEFEERRTRVFAQMQPNSALLLFSEIEKRRNNDCTYPFRQDSYFWYLTGFNEPNAALLLLKTEQAEKAIIFLRPRDPLLETWNGRRLGVERAPQQLNVNEAYSIEEFATVLPKILKNLTALYHVPEIHTWGDTLVSESAVNFSEILDWRPMLSEMRLIKSPNEIRLIQQAGQITALGHIKAMQTTRPNRFEYEIESDILHEFNRHCARFPSYNSIVAGGSNACILHYTENDRPLNDGDLVLIDAGCEFAMYAGDITRTFPVNGKFSQPQREIYELVLKAQKRAIELLVPGNSIKQANDEVIRIKTQGLVDLGILKGDVDTLIEQQAYRQFYMHGLGHWLGLDVHDVGSYGQDKQRILEIGMVITVEPGIYISEDADVPEQXXXFIH

SEQ ID NO: 1727 - DNA, 549 bp, Haemophilus influenzae
atgcttatttcttattccgaccttaaccaacaacttaaatctgctggaatcggctttaatgcaacagaactacacggctttttaagcggtttactttgtggtggattaaaagatcaaagttggctaccgctcttatatcaattcagcaatgataatcacgcttatccaacaggattagtccaacccgttacagaactttatgaacaaattagtcaaaccttatcaaatgttgaaggctttacctttgaacttggtttaactgaagatgaaaatgtctttacacaagcggatagcctatctgactgggcaaaccaattcttacttggtcttggcttagcacaacctgaattagcaaaagaaaaaggcgaaattggcgaagcggtagatgatttacaagatatttgccaacttggttataatgaagatgataatgaagaagagcttgcggaagcactagaagaaatcattgaatatgttcgcaccattgcaatgttgttctattctcatttcaacgaagaagaaattgagagcaaacctgtattacattaa

SEQ ID NO: 1728 - protein, 182 aa, Haemophilus influenzae
MLISYSDLNQQLKSAGIGFNATELHGFLSGLLCGGLKDQSWLPLLYQFSNDNHAYPTGLVQPVTELYEQISQTLSNVEGFTFELGLTEDENVFTQADSLSDWANQFLLGLGLAQPELAKEKGEIGEAVDDLQDICQLGYNEDDNEEELAEALEEIIEYVRTIAMLFYSHFNEEEIESKPVLH

SEQ ID NO: 1729 - DNA, 1023 bp, Haemophilus influenzae
atgttacaacaaaccacttttaatgcgcctgatggtgcaccttatcagcttataaccctgcaaaatgaaaatgggatgcgtgttcaatttctggattggggcgcaacttggctttcttgtaaagtgccagtaaatgacacattacgcgaggttttattaggttgtaaggtagagaattaccccactcatcaaagctatttaggcgcaagcgtagggcgttatgcaaatcgtattgcaaatgcacaatttgaattgaatggcgaacttattaaattaagtagtaatcaaggaaagcaccagcttcatggtggagagggttttgataaacgtcgttggaaaatccaaaagtgcggtaaaaattttgtgtgtttttcattacagtcagaggatggcgatcagggttttcctgggaatgtggatgtgtctgtaacctatacgctaacagatgataatagcgtaaaaattgaatatgcagggatttgtgataaggatactgcattgaacttaacgaatcatgcctatttcaatttagaaaatgcagagcaaggcagtgacgtgcgtgaacatacattacgtttaaatgctgatttttatctgcctgtagataatgaggggattcctaattctccattaaagcacgtagtgaatacgagttttgacttccgtattgctaaacccatcaagcaagattttttacaaggggatcagcaagcaacaaagggttacgatcattcctttattgtcaataaagcttggcaaaagccttgtgtgttactaacctctccaactggcgatttaagtttggaagtaagaacctcgcaagctgcattgcaggtttatacgggtaattatcttgcaggtacaccaacgagaaatggcgaattatatgccgatttttctggcgtagcactagaaacccaatgtttgcccgacacgcctaatcatcctgaatggcaaaattacggcgggattcaaaaagcaggcgagcaatattatcaatggacggagtttaaatttaaataa

SEQ ID NO: 1730 - protein, 340 aa, Haemophilus influenzae
MLQQTTFNAPDGAPYQLITLQNENGMRVQFLDWGATWLSCKVPVNDTLREVLLGCKVENYPTHQSYLGASVGRYANRIANAQFELNGELIKLSSNQGKHQLHGGEGFDKRRWKIQKCGKNFVCFSLQSEDGDQGFPGNVDVSVTYTLTDDNSVKIEYAGICDKDTALNLTNHAYFNLENAEQGSDVREHTLRLNADFYLPVDNEGIPNSPLKHVVNTSFDFRIAKPIKQDFLQGDQQATKGYDHSFIVNKAWQKPCVLLTSPTGDLSLEVRTSQAALQVYTGNYLAGTPTRNGELYADFSGVALETQCLPDTPNHPEWQNYGGIQKAGEQYYQWTEFKFK

SEQ ID NO: 1731 - DNA, 639 bp, Haemophilus influenzae
  misc_feature 4, 5, 6, 7, 8: n is any nucleotide
atgnnnnnaatttctgcgctggggcaggaaaatcatttactgatgatcgattgtcgtagtcttgaaaccacgccaacacccgtaccacaagatgttgccgtgattattgtgaattcaaacgtaccgcacgatttggtaacgggtgaatacaatactcgccgtcagcaatgtgaagaggcggcaaaattttttggggtaaaagcattacgtgatgtttcggttgaacaattccaaaaaagagaagcggaattgaccgcactttctccgttagcagcaaaacgcgctcgtcatgtcgtaacagaaaatcaacgagtactcgatgcagtggaagcattgaagaaaaatgatttgacccgtttaggtgagttaatgagggaatctcatgattcaatgcgtgatgattttgaaattaccgtgccacaaattgattatttagttgaattggttcaacttgttattggcaaaagtggcggtgcacgtatgacgggcggcggttttggtggctgtattgtcgcacttgcaccgcatgataaagtcgatgcagttcgtaaaattattgcggataattacgagaaaacgactggtttaaaagaaactttttatgagtgtaccgcatcacaaggtgtgcgagtgatttaa

SEQ ID NO: 1732 - protein, 212 aa, Haemophilus influenzae
  VARIANT 2, 3: Xaa is any amino acid
MXXISALGQENHLLMIDCRSLETTPTPVPQDVAVIIVNSNVPHDLVTGEYNTRRQQCEEAAKFFGVKALRDVSVEQFQKREAELTALSPLAAKRARHVVTENQRVLDAVEALKKNDLTRLGELMRESHDSMRDDFEITVPQIDYLVELVQLVIGKSGGARMTGGGFGGCIVALAPHDKVDAVRKIIADNYEKTTGLKETFYECTASQGVRVI

SEQ ID NO: 1733 - DNA, 507 bp, Haemophilus influenzae
  misc_feature 489, 490, 491, 492, 493: n is any nucleotide
atgaccccaatccaaaatgctcaacaaattttcaatagacagcataaaaatttgccagaaattaccgtctatgcgccaggccgagtaaatatcatcggcgaacataccgactacaacgacggctttgttatgccttgcgcaattaattttggtacggccgtttctggtacaaaacgagatgatcatatttggaatgtttatgctgcagatcttgatgaaactgatgaattttctctcaatgttgaaattcttaagagtgaacacaaatgggccaattacgtgcgtggggtggtaaaatttatccaagaacgttacccgcactttcaacaaggtgcaaatttagtgatttctggtaatgtgccgctttcttcaggattaagttcttctgcagcgttagaagttgcggtgggtaaattctgccaacaacttggcgatttaccactttctcatacggatattgcattgaatgggcaaaaggctgaaaaccannnnncattcattcattaa

SEQ ID NO: 1734 - protein, 168 aa, Haemophilus influenzae
  VARIANT 163, 164, 165: Xaa is any amino acid
MTPIQNAQQIFNRQHKNLPEITVYAPGRVNIIGEHTDYNDGFVMPCAINFGTAVSGTKRDDHIWNVYAADLDETDEFSLNVEILKSEHKWANYVRGVVKFIQERYPHFQQGANLVISGNVPLSSGLSSSAALEVAVGKFCQQLGDLPLSHTDIALNGQKAENXXXFIH

SEQ ID NO: 1735 - DNA, 954 bp, Haemophilus influenzae
gtggcaaggggcaacagggaaaaagtcaatgaagaacaaaaaccaagttatgatccaacttgttatctttgcccgagtaataagcgtattacaggggaattaaatccagattatcgtaaaccttatgtgtttaaaaatgatttttccgcgcttttagaagatacgccagcccctgaaaaatcctccgatcctcttttccaaagttctcaagctcgtggggaaagtcgagtcatttgtttctctcccgatcatagtaaaacattgccattattgaccgcacttgagattgaagaagtgattaaagtatggcaggaacaacttcgtgaacttggtgcgaaataccaatgggtgcaaatttttgaaaacaaaggggcggcaatggggtgttctaacccacatccacatggtcaaatttgggcgaatagtttcttgccaaatgaagttgctcgtgaagatcgtacacaacgtgattatttgctaaaacatggctcagtaatgttggttgattatgtaaaacgagaattagcgttgaaagaacgtattgtcgttgaaactgaacattgggtcgctttagtgccttattgggctgtttggccatttgaaacattgcttttaccaaaaactcatgtaaaacgtttaactgaattaagtgacgaacaatcaaaagatcttgcggttattttgaaaaaattgacgactaaatacgacaatctctttgaaacttctttcccatattcaatgggatttcatgcggcaccatttaatggcgaagataacgaacattggcagctacatgctcatttttaccctcctcttttgcgttcagcaaccgtgcgtaaatttatggtggggtatgaaatgttaggcgaaaaccaacgcgatttaacggcggaacaggctgcagatcgattacgtgctttgagtgaagttcattataaagaaagaactaaataa

SEQ ID NO: 1736 - protein, 317 aa, Haemophilus influenzae
MARGNREKVNEEQKPSYDPTCYLCPSNKRITGELNPDYRKPYVFKNDFSALLEDTPAPEKSSDPLFQSSQARGESRVICFSPDHSKTLPLLTALEIEEVIKVWQEQLRELGAKYQWVQIFENKGAAMGCSNPHPHGQIWANSFLPNEVAREDRTQRDYLLKHGSVMLVDYVKRELALKERIVVETEHWVALVPYWAVWPFETLLLPKTHVKRLTELSDEQSKDLAVILKKLTTKYDNLFETSFPYSMGFHAAPFNGEDNEHWQLHAHFYPPLLRSATVRKFMVGYEMLGENQRDLTAEQAADRLRALSEVHYKERTK

SEQ ID NO: 1737 - DNA, 165 bp, Haemophilus influenzae
ttgactttttccctgttgccccttgccacgggcgtttggcacgatgtggcgaaactaaaacccattgatcgattaacggattgtagcgacgatgtgatgttctgtagttcaaaaagtgcggtcattttgactcctgttttttatcaatgtaagcgattacattaa

SEQ ID NO: 1738 - protein, 54 aa, Haemophilus influenzae
MTFSLLPLATGVWHDVAKLKPIDRLTDCSDDVMFCSSKSAVILTPVFYQCKRLH

SEQ ID NO: 1739 - DNA, 93 bp, Haemophilus influenzae
ttgtcacaaaataagaaaataagcaaaattttttatgatttagttcatacttatgaaagtaaccgctttcaatttatcgtaaattatttatga

SEQ ID NO: 1740 - protein, 30 aa, Haemophilus influenzae
MSQNKKISKIFYDLVHTYESNRFQFIVNYL

SEQ ID NO: 1741 - DNA, 999 bp, Haemophilus influenzae
atgagtactattcgagatgtcgctaaattagccaatgtatctgtcgctaccgtatcccgagtattaaatcactctctttctgttagtgaaaatacacgccttgcggtggaacaagctattgcacagttagcttatcaacctaatgcaaatgctcaagcccttgccgtgcagaacaccgatacaattggcgtggtggtaaccgatgtgacggatgccttttttgcaattttagtaaaagcggtggataaagtagcagaagcacatcaaaaaacgattcttatcggtattggttatcatcatgcggaaaaagagcgggaagcaattaataccttattacgtaagcgttgtagttctcttgttgtacattctaaagccttatctgatgatgaattaagccattatttaaatactgtgcaaggaatggtaatcattaaccgtgttattaaaggttatgaacatcgttgtgtcagtttagataaccaaaaaggcacttatttagccacggaaatgcttattcgttatgggcatcaacatattgcatatatcggttcaaatcacgccatttttgatgaagttgaaagaagaaatggttatcttgccgcattaaaagatcacaattatctcatcattgaacaggcgataacactcaatagcccagactttgaaggcggcgaaaaagcaatgattgatttacttagttataacaaaaatcttacggctgtcgttgcttataacgattcaatggcggcgggagccatttcagttctcaatgaaaacaatatcagcgtaccaagccaattttcaattattggttttgatgatatgccgattgcccgttatttgatcccaaaattaaccacaattcgctatcctattgatttaatggcaacttatgcggctaaattagcattaagtctaactgacgagaaaataattacacctccagtagttcaatttaaccctactttggtacgccgtttttcggtggaatcgcgctaa

SEQ ID NO: 1742 - protein, 332 aa, Haemophilus influenzae
MSTIRDVAKLANVSVATVSRVLNHSLSVSENTRLAVEQAIAQLAYQPNANAQALAVQNTDTIGVVVTDVTDAFFAILVKAVDKVAEAHQKTILIGIGYHHAEKEREAINTLLRKRCSSLVVHSKALSDDELSHYLNTVQGMVIINRVIKGYEHRCVSLDNQKGTYLATEMLIRYGHQHIAYIGSNHAIFDEVERRNGYLAALKDHNYLIIEQAITLNSPDFEGGEKAMIDLLSYNKNLTAVVAYNDSMAAGAISVLNENNISVPSQFSIIGFDDMPIARYLIPKLTTIRYPIDLMATYAAKLALSLTDEKIITPPVVQFNPTLVRRFSVESR

SEQ ID NO: 1743 - DNA, 867 bp, Haemophilus influenzae
atgcgcaaagaaattgataaagaagctaaagtagtcggtggcattaaactcttaatgaatgactctcaaaatgcacaatctattcaaaatgaccaagttgatatcttactctctaaaggcgtgaaagcacttgcgattaacttggtggacccagcggcagctccaactattattggcaaggcaaaatcagataatattcctgtcgtattctttaacaaagaccctggtgcaaaagctatcggttcttatgaacaggcttactatgtaggtactgatccaaaagaatcaggcttaattcaaggggatttaattgcaaaacaatggaaagcgaatccagctcttgacttaaataaagatggcaaaatccaatttgtattattaaaaggcgaacctggtcatccagatgcggaagtgcgtacaaaatatgttgtagaagaacttaatgcgaaaggtatccaaactgaacaattatttattgatactggtatgtgggatgctgcaatggcgaaagataaagtagatgcttggttatctagctctaaagcgaacgacattgaagtcattatttctaacaacgatggtatggcattaggtgcgttagaagcaacaaaagcgcacggtaaaaaattacctatctttggtgtagatgcgttaccagaggcattacaattgattaataaaggcgaacttgcgggtacagtattaaacgatagtgtaaaccaaggtaaagcagttgttcaattatctaacaatttagcacaaggtaaatctgcaactgaaggtacaaaatgggaattaaaagatcgtgttgtacgcattccttatgttggtgtggataaagacaacttaggtgactttttaaaataa

SEQ ID NO: 1744 - protein, 288 aa, Haemophilus influenzae
MRKEIDKEAKVVGGIKLLMNDSQNAQSIQNDQVDILLSKGVKALAINLVDPAAAPTIIGKAKSDNIPVVFFNKDPGAKAIGSYEQAYYVGTDPKESGLIQGDLIAKQWKANPALDLNKDGKIQFVLLKGEPGHPDAEVRTKYVVEELNAKGIQTEQLFIDTGMWDAAMAKDKVDAWLSSSKANDIEVIISNNDGMALGALEATKAHGKKLPIFGVDALPEALQLINKGELAGTVLNDSVNQGKAVVQLSNNLAQGKSATEGTKWELKDRVVRIPYVGVDKDNLGDFLK

SEQ ID NO: 1745 - DNA, 1521 bp, Haemophilus influenzae
atgacagctcaaactcaatgtcaagacagccaagtgctgctcacaatgaccaatgtctgcaagtcctttccaggcgtaaaagctttagataacgcaaacttaacggttcgatcacattctgttcatgccttaatgggcgagaacggcgcgggcaaatctacattactaaaatgtttattcggtatttatgccaaagatgaaggcgaaattcttttcttaggcgaacccgtcaatttcaaaacatctaaagaagcccttgaaaatggtatttcaatggtgcaccaagaactcaacctcgtgcgccaaactagcgtaatggataatttatggcttggacgctatccacttaaaggtccttttgttgatcacgccaaaatgtaccgtgatactaaagcgatttttgatgaattggatattgatgtagatccgaaagaaaaagtcgccaaactttcagtttctcaaatgcagatgatcgaaattgcgaaggcgttctcgtataacgctaaaatcgtaatcatggatgaaccaacatcctcgctttctgaaaaagaagttgagcatttgtttaaaattatcgacaaattaaaacaacgcggttgcggcattatttatatttctcacaaaatggatgaaatcttcaaaatctgtgatgaaattactattttacgcgacggtaaatggatcaacacggtaaacgtgaaagaatctacaatggaacaaattgttggaatgatggtagggcgtgaattaacacagcgtttccctgaaaaaaccaacgtgccaaaagaagttattttgcaggtggaaaatcttaccgctaaaaatcaaccatccattcaagacgtatcttttgaattacgcaaaggtgaaattctcggtattgcaggacttgtgggggctaaacgtaccgatatcgttgaagctatttttggcgtacgtgaattaatcgaaggaacgattaagttacacggaaaaactgtgaaaaatcataccgcacttgaagcgattaataatggctttgcattggttactgaagagcgtcgttcaacggggatttattctaatttaagtattgagtttaattcattgatttcaaatatgaaatcttatctcactccgtggaaattacttagcacgaagaagatgaaaagtgatacccagtgggtaattgattcaatgaatgttaaaacaccatcacacagaactacaattggttctctttctggtggtaaccaacaaaaagtcattattggtcgttggcttttaactcaacctgaaattttgatgctagatgagccgactcgtggtatcgatattggggcaaaatttgaaatttaccaacttattcaagaactcgctaaaaaagataaaggcattattatgatttcatcagaaatgccagaattactgggtgtgactgatcgcattttagtaatgagtaacggtaaattagcaggtatcgttgaaagcgcaaaaacatcgcaagaagaaattttgcaactcgcggcaaaatatttataa

SEQ ID NO: 1746 - protein, 506 aa, Haemophilus influenzae
MTAQTQCQDSQVLLTMTNVCKSFPGVKALDNANLTVRSHSVHALMGENGAGKSTLLKCLFGIYAKDEGEILFLGEPVNFKTSKEALENGISMVHQELNLVRQTSVMDNLWLGRYPLKGPFVDHAKMYRDTKAIFDELDIDVDPKEKVAKLSVSQMQMIEIAKAFSYNAKIVIMDEPTSSLSEKEVEHLFKIIDKLKQRGCGIIYISHKMDEIFKICDEITILRDGKWINTVNVKESTMEQIVGMMVGRELTQRFPEKTNVPKEVILQVENLTAKNQPSIQDVSFELRKGEILGIAGLVGAKRTDIVEAIFGVRELIEGTIKLHGKTVKNHTALEAINNGFALVTEERRSTGIYSNLSIEFNSLISNMKSYLTPWKLLSTKKMKSDTQWVIDSMNVKTPSHRTTIGSLSGGNQQKVIIGRWLLTQPEILMLDEPTRGIDIGAKFEIYQLIQELAKKDKGIIMISSEMPELLGVTDRILVMSNGKLAGIVESAKTSQEEILQLAAKYL

SEQ ID NO: 1747 - DNA, 1011 bp, Haemophilus influenzae
atgagtgccttagaaaaaaacaaatcctttgatctcttaaaacaaaatgcgatttattttgtgttattgattttgctcggcatcatcattgcacaagatccgacattcttaaatttagtcaatttcagtaacatcttaacccaatcttctgtacgtttaattattgctttaggggttgcgggtttattgattacacaagggactgacttatctgcaggtcgtcaagtcggtttggctgcagttatctctgcaacaatgttgcaatcaatggaaaatattaaccgcgtgttccctgaaatgggacaaataccaattccagtggttattctcgcagtttgtgctatcggtgcagtaattggtttagtgaatggtttagttatcgcttacttaaatgtaactccattcatcgcaaccatgggtacaatgatcatcatatatggtttcaactcactatactatgatgctgtaggtggttctccaatcgcaggttttagtgaaaatttctcaacatttgctcaaggattcttccgagtcggcagttttaaactctcttatatcacgatttatgcagctattgcagcattattagtatggattatgtggaacaaaactcgtttcggtaaaaacgtctttgctattgggggtaacccagaagcagctaaagtatctggtgtaaacgttgcacgtaacttagttgcaatctatatgattgcaggtatgttctatgcctttggtggtatgcttgaagcgggtcgtatcggttctgcaactaacaacttaggttttatgtatgaattagatgctatcgccgcttgcgtagtgggtggtgtatcttttgctggtggggtaggtacagtaattggtgttatcactggggttattatctttactgttatcaactacggtttaacttacatcggtgtaaacccttactggcaatacatcattaaaggtagcattatcattctagcggtagccattgactcgttaaaatatgcgaagaaaaaataa

SEQ ID NO: 1748 - protein, 336 aa, Haemophilus influenzae
MSALEKNKSFDLLKQNAIYFVLLILLGIIIAQDPTFLNLVNFSNILTQSSVRLIIALGVAGLLITQGTDLSAGRQVGLAAVISATMLQSMENINRVFPEMGQIPIPVVILAVCAIGAVIGLVNGLVIAYLNVTPFIATMGTMIIIYGFNSLYYDAVGGSPIAGFSENFSTFAQGFFRVGSFKLSYITIYAAIAALLVWIMWNKTRFGKNVFAIGGNPEAAKVSGVNVARNLVAIYMIAGMFYAFGGMLEAGRIGSATNNLGFMYELDAIAACVVGGVSFAGGVGTVIGVITGVIIFTVINYGLTYIGVNPYWQYIIKGSIIILAVAIDSLKYAKKK

SEQ ID NO: 1749 - DNA, 735 bp, Haemophilus influenzae
atgctaattaactttacacaagtattgcaagacagttggaatttcttccgtaatcagaaaaaaattatgctgcaatttgtcgcaattttatttattgtgcaaagcgcgagtgcacttttaagtttttcagttaatgatgaaaataaaaatgatgtattaaatctcgccaatacagatatcacaagttttatcttttcagttgcaatcactcaaattttaacgagctttattgcagcttggggattaacctcaatccataaaattagcctacaaaattatcgcactttaggtgaaaccttctcacttaccttgcgccgttttgcaggcgtaattctgttagatctattaatggttgcaccaatgttacttggtcttggtgaagcctttgctgcattactcacaaaaaaatcgccctctattatgtcacttatcgcgatgcttgttggcgtttggttctttgtccgtttaaatttaacggtagtacattatctttctactcaagaggcactttcgcaaactatccgaaaaatttggatgcgaggaaatactcgaaaaggcgtattgtttatttacaccctactggtttattttttcgtgccaattcttattttccaattaagcgcattttccaataatgctgtatttgatatggtaataggcattttcaccgcattacttaatattttcatgctagtagtgacttatcgtttctacagcttatttatgaaggattaa

SEQ ID NO: 1750 - protein, 244 aa, Haemophilus influenzae
MLINFTQVLQDSWNFFRNQKKIMLQFVAILFIVQSASALLSFSVNDENKNDVLNLANTDITSFIFSVAITQILTSFIAAWGLTSIHKISLQNYRTLGETFSLTLRRFAGVILLDLLMVAPMLLGLGEAFAALLTKKSPSIMSLIAMLVGVWFFVRLNLTVVHYLSTQEALSQTIRKIWMRGNTRKGVLFIYTLLVYFFVPILIFQLSAFSNNAVFDMVIGIFTALLNIFMLVVTYRFYSLFMKD

SEQ ID NO: 1751 - DNA, 558 bp, Haemophilus influenzae
atgaaacaactccttgactttatccctttaattttattttttatcacttacaaactcggtggtgtacgtgaagcagctatcgtattagtggttgcaacaattttgcagatcgtgattttaaaatggaaatacggaatagttgaaaaacaacaaaaaattatggcaagtgcggtcgttttttttggacttttaaccgcttactttaatgaaatccgctatttgcaatggaaagtgacaattatcaatggcttatttgctattgttttgctcgtcgcacaatttcaatttaaaaccccattaatcaaaaaattacttggtaaagagctacaattgcccgaaaaggcttggaatacacttaaccttggctgggcaatattctttattatttgtatgttggtaaatatttatatcagccataatatgtcggaagaggcttgggttgatttcaaatcttttggaattattggtatgacagtgattgcaaccattatttcgggagtttatatttatcgttatttgcctaaagatggctcaaattcaaaagacggagagaaataa

SEQ ID NO: 1752 - protein, 185 aa, Haemophilus influenzae
MKQLLDFIPLILFFITYKLGGVREAAIVLVVATILQIVILKWKYGIVEKQQKIMASAVVFFGLLTAYFNEIRYLQWKVTIINGLFAIVLLVAQFQFKTPLIKKLLGKELQLPEKAWNTLNLGWAIFFIICMLVNIYISHNMSEEAWVDFKSFGIIGMTVIATIISGVYIYRYLPKDGSNSKDGEK

SEQ ID NO: 1753 - DNA, 396 bp, Haemophilus influenzae
atgccttctgacaccaatgctaacggagatatttttggtggctggattatgtctcaaatggatatgggcggcgcgattttagcgaaagaaatcgcacacggacgggtggttactgttgccgttgaaagtatgaattttatcaaaccaatctctgtgggcgatgtggtttgttgctacggtgaatgtctcaaagttgggcgttcttccattaaaattaaagtagaagtatgggtaaaaaaagtggcgagtgagccaattggcgaacgttattgtgtcaccgatgcggtatttacttttgttgcagttgataataatggtcgctctcgcacgattccccgtgaaaataaccaagagttagaaaaagcattagccttaatttcagaacaacccttgtaa

SEQ ID NO: 1754 - protein, 131 aa, Haemophilus influenzae
MPSDTNANGDIFGGWIMSQMDMGGAILAKEIAHGRVVTVAVESMNFIKPISVGDVVCCYGECLKVGRSSIKIKVEVWVKKVASEPIGERYCVTDAVFTFVAVDNNGRSRTIPRENNQELEKALALISEQPL

SEQ ID NO: 1755 - DNA, 297 bp, Haemophilus influenzae
atgtactatgttatttttgcccaagatattcccaatacgttagaaaagcgtcttgccgtacgcgagcaacacttggctcgtttaaaacaacttcaagcggaaaatcgcttactgacagcaggcccaaatcctgcaattgatgatgaaaatccgagtgaagctggttttacaggttcaactgttattgctcaatttgaaaatctacaagcggcaaaagactgggctgcacaagatccttatgtagaagctggcgtatatgcggatgttattgtaaagccgtttaaaaaagtcttttaa

SEQ ID NO: 1756 - protein, 98 aa, Haemophilus influenzae
MYYVIFAQDIPNTLEKRLAVREQHLARLKQLQAENRLLTAGPNPAIDDENPSEAGFTGSTVIAQFENLQAAKDWAAQDPYVEAGVYADVIVKPFKKVF

SEQ ID NO: 1757 - DNA, 639 bp, Haemophilus influenzae
atgaaaaaagtcgccttaatttctctttgtatttttaccgcactttctgcttttgccgatttgcctaatacggcaacagcatcaatcaatcttgagcaagaaaaacaaaactgggcgtcaatacagcatcaagactacttaaaacgtctaaaacaacgtgaagtctttttgcaagttgaaggtttgctaaaaagtgcggtaaaaaaccagcaattttctgaagcgactcaaaatatcacaaaaaccttaatagactcattgcaaggctaccctttgcaatatgatctgcttgctcgattttgggagacaaaaatcgccttttttcagaatgatgatattcaaggaagacaacaagcaataaatgaactcaatgcgttagtgcaacaaaattacccttttgtgacgccagcatttcaagccttattacaaaaactatccacgttaaacgaacaacaaacatcagcaacttcagataatgctaaagaaaataacagggttcaaaaagaacaaaatcaagtagaaaatcctaaacaacttgctgaaattgtaagaaaaagtgatcctaacactttagataaaaccgtattaattgatgcttttccacgttatcttaaaacgctacctgaacaaataaaataa

SEQ ID NO: 1758 - protein, 212 aa, Haemophilus influenzae
MKKVALISLCIFTALSAFADLPNTATASINLEQEKQNWASIQHQDYLKRLKQREVFLQVEGLLKSAVKNQQFSEATQNITKTLIDSLQGYPLQYDLLARFWETKIAFFQNDDIQGRQQAINELNALVQQNYPFVTPAFQALLQKLSTLNEQQTSATSDNAKENNRVQKEQNQVENPKQLAEIVRKSDPNTLDKTVLIDAFPRYLKTLPEQIK

SEQ ID NO: 1759 - DNA, 960 bp, Haemophilus influenzae
atggcgatttggcaaaaaactgaattaacctcttggctaaatttgctttctgccgaatcaaaaagtaagcaagaatggcgttattgggaagcgaaacaagatatattaaaaaataccaaaaaactgaccgcactttcaaaagagcgtggcttttatccaatgttagcggctacacaattaaaacaagcatatcaactgaatgtccctattgcgccaagttttactcaagctgaacaacttccttttaagcaagtttttgcaatgattacagaattaagagaacttggacgaaatggtttagcaaaacaacgttggcgaattttacttgataatgttgattttacaactcagctaaaactttctgaatatgccaaaaatcagcaatggtttgaattagctgttgatgcttctattgtagcaaaagcgtgggattacctgtctcttcgtctgccaaatgcttattctgaatacttcaatgctgcattacagaatttgaatatgagcaaaacttttgctatggcaatcgctcgtcaagaaagtgcttggaatctaatggcacaatcttcagcaaatgcgcggggcttaatgcagcttttgccaagtacggcaaaattgactgcagagaataatcaactaccttatcaaggcgaacaagatttattcaaaccattgaataatattttgctaggtaccgcacagcttaatgaactcaatggaaaatatcctaataatcgaatattgattgcagccgcttataatgcaggggcaaatcgagtagaaaaatggttaagtcgtgcgagtggaaaattagcattagatgaatttgttgcatctattcctttttatgaaactcgtggttatgtgcaaaatgtagtcgcttatgatttttactatcaaattttgcaaaataaagaaaacccacaaatttttagccaagaagaattgaatcggctatactaa

SEQ ID NO: 1760 - protein, 319 aa, Haemophilus influenzae
MAIWQKTELTSWLNLLSAESKSKQEWRYWEAKQDILKNTKKLTALSKERGFYPMLAATQLKQAYQLNVPIAPSFTQAEQLPFKQVFAMITELRELGRNGLAKQRWRILLDNVDFTTQLKLSEYAKNQQWFELAVDASIVAKAWDYLSLRLPNAYSEYFNAALQNLNMSKTFAMAIARQESAWNLMAQSSANARGLMQLLPSTAKLTAENNQLPYQGEQDLFKPLNNILLGTAQLNELNGKYPNNRILIAAAYNAGANRVEKWLSRASGKLALDEFVASIPFYETRGYVQNVVAYDFYYQILQNKENPQIFSQEELNRLY

SEQ ID NO: 1761 - DNA, 306 bp, Haemophilus influenzae
atgtatatcagccgtaatttagaacaatggaatgcatttcttcaaatgctaaaaatcgcctttgaagaaaacaaagcacaggaatttctaaccttattattaacagcagacgaacgagatgctgtaggattacgcttgcagattgtctctcagctgattgataaaaatatgcctcagcgtgaaattcaacaaaatctgaatacaagtgccgccacaatcactcgaggttccaatatgattaaaacgatggatcctgattttatgcaatggatgaaacaacatcttgatctcattgaaaaaaactaa

SEQ ID NO: 1762 - protein, 101 aa, Haemophilus influenzae
MYISRNLEQWNAFLQMLKIAFEENKAQEFLTLLLTADERDAVGLRLQIVSQLIDKNMPQREIQQNLNTSAATITRGSNMIKTMDPDFMQWMKQHLDLIEKN

SEQ ID NO: 1763 - DNA, 750 bp, Haemophilus influenzae
ttgatctcattgaaaaaaactaagcgaatttttaccgcactttctcacttatttagtcctaaatggtggaaaaaaaactggcagcgagttgtcttttgtttttttttcgccgtttttgctttgttgctgatttttcgctttgtacctattccattttccgcttatatggtacaacaaaaaatcgctaatcttttacaaggtgattttcgatatcaaattcaatatgactgggttagcctagaaaatatctctccaaacattcaattagctgtgatttcatcagaagatcagcgttttcttgaacatttaggctttgattttgaggctatccaacgagcaattcggtataacgaaaaatctaacaaaggaatccgaggggcatcaactatttcccagcaaactgctaaaaacttaatgctttggcacggacaaaattggctaagaaaaggtttagaagttccagcaactatgctactcgagctgacttggtcaaaaaaacgtattttagaagtgtatttaaatattgcggaatttggaaacggaatctttggtgtggaagcggcaagtcgctattactttaaaaaatcagctaaaaatttatctcaaaatgaagccgcacttttagctgctgtgttgcctaatccaatcatttataaagtaaataagccaagcttattagttcgtaaaaaacaaacttggattttgggacaaatgggaaatttaggcactgaatacttgagcgatttataa

SEQ ID NO: 1764 - protein, 249 aa, Haemophilus influenzae
MISLKKTKRIFTALSHLFSPKWWKKNWQRVVFCFFFAVFALLLIFRFVPIPFSAYMVQQKIANLLQGDFRYQIQYDWVSLENISPNIQLAVISSEDQRFLEHLGFDFEAIQRAIRYNEKSNKGIRGASTISQQTAKNLMLWHGQNWLRKGLEVPATMLLELTWSKKRILEVYLNIAEFGNGIFGVEAASRYYFKKSAKNLSQNEAALLAAVLPNPIIYKVNKPSLLVRKKQTWILGQMGNLGTEYLSDL

SEQ ID NO: 1765 - DNA, 345 bp, Haemophilus influenzae
atggttgatcaaaatccaaaacgctccggcgaaccgccagtatggttaatgttcggtgctggcggcacagtgagtgcaattttccttcctgtcgttattctaatcatcggtttgttattaccatttggtttagtcgatgcgcataatttaattacttttgcttattcttggattggtaaattagttattttagtgcttactattttcccaatgtggtgtggtttacaccgtattcatcacggtatgcacgatcttaaagtacatgtgccagctggtggatttatcttttacggtttagccacaatttataccgtttgggtattatttgcggtaataaacctgtaa

SEQ ID NO: 1766 - protein, 114 aa, Haemophilus influenzae
MVDQNPKRSGEPPVWLMFGAGGTVSAIFLPVVILIIGLLLPFGLVDAHNLITFAYSWIGKLVILVLTIFPMWCGLHRIHHGMHDLKVHVPAGGFIFYGLATIYTVWVLFAVINL

SEQ ID NO: 1767 - DNA, 411 bp, Haemophilus influenzae
atgtcagtaacagtgagtaaacgtaaaaaatatgttcgtccaatgacagcgacttggtggcaaaaattggacttctacaaagcttatatgctacgtgaagcgacttcagtctttgctgtatggttttgtattgtattgctttatggtgttctttgccttgcaagcaatccaatgccaggcttaggcatcttgagctttattgagtttttaagaaaccctattgtagtgttcttaaatattattacgcttatcgcaacgctttatcatacggtgacatatttcttaatgactccaaaagtgatgaatatcattgtgaaaaatgaacgcttaccacacacagttgtaagaaatgcactttgggcggtaaccgcattagttagcgtgattgcgttagctttagtttatatttaa

SEQ ID NO: 1768 - protein, 136 aa, Haemophilus influenzae
MSVTVSKRKKYVRPMTATWWQKLDFYKAYMLREATSVFAVWFCIVLLYGVLCLASNPMPGLGILSFIEFLRNPIVVFLNIITLIATLYHTVTYFLMTPKVMNIIVKNERLPHTVVRNALWAVTALVSVIALALVYI

SEQ ID NO: 1769 - DNA, 771 bp, Haemophilus influenzae
atggctaattcaccagtaatgaatgttgaagtattacgctacaatcctgaaatcgatcaagagccacatttaagcacctatcaagtaccttatgataatcaaacttcattgcttgatgcgttaggctatattaaggataaacttgaaccctctctttcttatcgttggtcttgccgtatggcgatctgcggttcttgcgggatgatggtaaataacaaaccaaaattggcttgtaaaactttcttacgtgattacagcggccatatgcgtatcgagccattagcaaacttccctattgaacgcgatttagtggttgatttaagccactttatcgaaagtttagaggcaattaagccttatattattggtaacgaagcaccagcattagatggtaaaccacatccatcgaaagaattacaagtaagccgtactaaacaaacaccagcacagcttgagaaatatcgtcaattctcaatgtgtatcaactgtggtttatgctatgccgcttgccctcaatttggtttaaatcctgaattcttaggtcctgcagctattacgatggctcatcgttataatcttgataaccgtgaccatggtaaagcaaaacgtatgtcattattaaatggtaaaaacggggtttggagttgtactttcgttggctattgctcagaagtttgtccaaaacatgtggatcctgcttctgcaattaaccaaggcaaagtggaaagcgccaaagattatgttatctctatgctaaaaccaaaaggctaa

SEQ ID NO: 1770 - protein, 256 aa, Haemophilus influenzae
MANSPVMNVEVLRYNPEIDQEPHLSTYQVPYDNQTSLLDALGYIKDKLEPSLSYRWSCRMAICGSCGMMVNNKPKLACKTFLRDYSGHMRIEPLANFPIERDLVVDLSHFIESLEAIKPYIIGNEAPALDGKPHPSKELQVSRTKQTPAQLEKYRQFSMCINCGLCYAACPQFGLNPEFLGPAAITMAHRYNLDNRDHGKAKRMSLLNGKNGVWSCTFVGYCSEVCPKHVDPASAINQGKVESAKDYVISMLKPKG

SEQ ID NO: 1771 - DNA, 1800 bp, Haemophilus influenzae
gtgcaaacagttaatgtcgatattgcgattgttggtgctggtggcggtggtttacgtgcagcgattgccgcagcagaagcaaatcctaacttaaaaattgcattagtttctaaagtatacccgatgcgtagccatactgtagcagcagaaggtggtgcagcggcagttatcaaagaagaagattcttacgataaacacttccaagataccgttgctggtggggactggctttgtgagcaagatgtagtggaatatttcgtgcaacattcaccagtggaaatgacccagttagaacgttggggatgcccttggagccgtaaagctgatggcgatgtaaacgtacgtcgtttcggtggaatgaaaattgagcgcacttggttcgctgcagataaaacaggtttccacttattacacacgcttttccaaacttctattcaatatccacaaatccaacgttttgatgaacacttcgtattagatattcttgttgatgatggccatgctcgtggtatggttgcaatgaatatgatggaaggatcacttgttcaaattaatgccaatgcggttgttattgcaactggtggtggttgtcgtgcatttaaatttaataccaatggcggcattgtaacaggtgacggcttatctatggcatatcgtcacggtgtaccacttcgtgatatggagtttgttcaatatcatccaacaggcttacctaatacgggtattttaatgaccgaaggttgtcgtggcgaaggcggtatcttagtgaataaagatggctatcgctatcttcaagattacggtctaggtcctgaaacaccaattggcaaaccgcaaaataaatatatggaacttggccctcgtgataaagtttctcaagcattctggcaagaatggaaaaaaggtaataccttaaaaaccgcgaaaggcgtagatgtggtgcatttagatttacgtcatcttggtgaaaaatatttacatgagcgtctaccattcatttgtgaattagcaagtgcttatgaaggtgtaaatccagtaaatgaaccaattccagttcgtccagttgttcactatacaatgggcggcattgaagttgattttaacagcgaaacacgtatcaaaggtttatttgctgtaggagaatgcgcatcttcaggtttacacggcgcaaaccgtttaggatctaactctttagctgaacttgttgtgttaggtcgcgttgctggggaatacgcagcacaacgtgcagttgaggctcaatcggtaaatcaaagtgcagttgatgctcaagcaaaagatgttgttgctcgcctagaagctcttcacaaacaagaaggtaatgaatcttggtctgaaatccgtgatgaaatgggtaccgtgatggaagaaggttgtggtatttaccgtgaccaagcaagtatgcaaaaagcagtagataaaattgcagagttaaaagaacgttacaaacgtattcgcgtatcagataattcaagcgtgttcaatacagatgtactttacaccgttgagttgggttacattctagatgttgcgcaatctattgcaaattcagcgattgaacgtaaagaatctcgtggtgctcaccaacgcttagattacacagaacgtgacgatgtcaattatttaaaacacacacttgctttctacaatgagaatggtgcgccgcgcattgaatacagtccggtgaaaattactaaatctcaacctgcaaaacgtgtttacggtgcggaagcagaagctcaagaagcagctgcgaaagctaaggagcaagcaaatggctaa

SEQ ID NO: 1772 - protein, 599 aa, Haemophilus influenzae
MQTVNVDIAIVGAGGGGLRAAIAAAEANPNLKIALVSKVYPMRSHTVAAEGGAAAVIKEEDSYDKHFQDTVAGGDWLCEQDVVEYFVQHSPVEMTQLERWGCPWSRKADGDVNVRRFGGMKIERTWFAADKTGFHLLHTLFQTSIQYPQIQRFDEHFVLDILVDDGHARGMVAMNMMEGSLVQINANAVVIATGGGCRAFKFNTNGGIVTGDGLSMAYRHGVPLRDMEFVQYHPTGLPNTGILMTEGCRGEGGILVNKDGYRYLQDYGLGPETPIGKPQNKYMELGPRDKVSQAFWQEWKKGNTLKTAKGVDVVHLDLRHLGEKYLHERLPFICELASAYEGVNPVNEPIPVRPVVHYTMGGIEVDFNSETRIKGLFAVGECASSGLHGANRLGSNSLAELVVLGRVAGEYAAQRAVEAQSVNQSAVDAQAKDVVARLEALHKQEGNESWSEIRDEMGTVMEEGCGIYRDQASMQKAVDKIAELKERYKRIRVSDNSSVFNTDVLYTVELGYILDVAQSIANSAIERKESRGAHQRLDYTERDDVNYLKHTLAFYNENGAPRIEYSPVKITKSQPAKRVYGAEAEAQEAAAKAKEQANG

SEQ ID NO: 1773 - DNA, 972 bp, Haemophilus influenzae
atgaccgcacttaatcattggcaaccttctgccgatataaaaaatcttcttaaacgggcaaaaattattgctgaaattcgtcaattttttacagaacgcggtttgcttgaagtagagacccctgttctaagtgaatttggcgtcactgatttacatctttccacctttagcacggaatttcttgcgcctttcggtgaacaatccaaaacactttggctttctacaagccctgaatatcatatgaaacgcttgcttgctgcaggcagtgggccgatattccaaatcagtaaagtgtttcgcaatgaagaagctggaaatcgccataatccagaattcactatgttggaatggtatcgaccgcactttcatatgcatcgtttaattaatgaagtagatgatttgctccaacaaattttagattgtccacctgcagaaagtttaagttaccaatttgttttccaagaatatgtaggcttagatcccttgtcagcagaacgttcagaattaattgaagcagcacgtaaacataattttatggctgaagataatgaagatcgcgatacgttattacagtttttatttagtgaagtcgttgagcctcaaattggaaaagaacgacctattgccgtgtatcatttcccttcaacacaagcagctctagcacaagtaagcccagaagatcagcgggtagcagaacgctttgagttctattataaaggtttagaattagccaatggttttcacgaacttgccgatgcgcaagaacaacgtcatcgctttgaattagataatcaacaaagacaaaaatgtgaattgcctactcgagaaattgatgaacgctttcttgctgccttagaagcgggtatgccagatgcttcaggtgtcgcattaggaatagatcgtttaatgatgatcgctttagattgtgaaaaaattaatgacgtcatttcttttgctatggacaatgcttaa

SEQ ID NO: 1774 - protein, 323 aa, Haemophilus influenzae
MTALNHWQPSADIKNLLKRAKIIAEIRQFFTERGLLEVETPVLSEFGVTDLHLSTFSTEFLAPFGEQSKTLWLSTSPEYHMKRLLAAGSGPIFQISKVFRNEEAGNRHNPEFTMLEWYRPHFHMHRLINEVDDLLQQILDCPPAESLSYQFVFQEYVGLDPLSAERSELIEAARKHNFMAEDNEDRDTLLQFLFSEVVEPQIGKERPIAVYHFPSTQAALAQVSPEDQRVAERFEFYYKGLELANGFHELADAQEQRHRFELDNQQRQKCELPTREIDERFLAALEAGMPDASGVALGIDRLMMIALDCEKINDVISFAMDNA

SEQ ID NO: 1775 - DNA, 684 bp, Haemophilus influenzae
atgtcaaaactcttactcgttgatgatgatattgaattaactgaactactttctacacttttagaacttgagggttttgacgttgaaactgcaaataatggattagaagcattacaaaaactcaatgaaagctataaactggttttacttgatgtaatgatgccaaagttaaatggtatcgaaacattaaaagaaattcgtaaagtctctaacgtgccagtgatgatgctaacagcaagaggcgaagacattgatcgcgtattaggcttagaattgggagcggatgattgtttacccaagccttttaacgatcgtgagcttattgcaagaattaaggcgattttgcgtcgtagtgcatctccttcaaataatatatcaaatgtagaaatcctttcttttgacggaattactctccacttttctcacggaattgcaacctataatgaagaaaatctaaatttaacggattatgaatttaagattctttgtttattgcttaaatctaagggaaatgtggtaagtcgagaagaattaagtttagaagtaatggaaaaaccactcactccatttgaccgtgctcttgatatgcacatctctaatttaagacgcaaattaccagaacgaaaaaacaagccctcttggtttaaaactttacgcggaaaaggatacgctttagttacctaa

SEQ ID NO: 1776 - protein, 227 aa, Haemophilus influenzae
MSKLLLVDDDIELTELLSTLLELEGFDVETANNGLEALQKLNESYKLVLLDVMMPKLNGIETLKEIRKVSNVPVMMLTARGEDIDRVLGLELGADDCLPKPFNDRELIARIKAILRRSASPSNNISNVEILSFDGITLHFSHGIATYNEENLNLTDYEFKILCLLLKSKGNVVSREELSLEVMEKPLTPFDRALDMHISNLRRKLPERKNKPSWFKTLRGKGYALVT

SEQ ID NO: 1777 - DNA, 414 bp, Haemophilus influenzae
atgcaagttaaaacacttttaggcgcaacctttttagcattaagcctcgcttcttgttccaccgttgaaaaagttgtatatcgaattgatgtaccgcaaggcaactatttagaggcgactaccgttgcgcaagttaaagaaggcatgacttctcaacaagtacaatatttgttgggaacaccaatattaatcgacccttataataactacacttggtactacgtattcttacaacaacgtgcctatgaaacgccagttcaacatactttcacagtaaaatttgatcaacgtgggattgtgacagaaacccatcttgataaacctttaccacaggtttcacaacaaggcgaaaataacaccattattgaaacaggtgagaaaccaaaatcaagctggtggaaattctggaaataa

SEQ ID NO: 1778 - protein, 137 aa, Haemophilus influenzae
MQVKTLLGATFLALSLASCSTVEKVVYRIDVPQGNYLEATTVAQVKEGMTSQQVQYLLGTPILIDPYNNYTWYYVFLQQRAYETPVQHTFTVKFDQRGIVTETHLDKPLPQVSQQGENNTIIETGEKPKSSWWKFWK

SEQ ID NO: 1779 - DNA, 894 bp, Haemophilus influenzae
atgatgttgcaattgcatcaaggctatcaaaataaagcgaaggcttttggcgtgtttcaggaaaagtctatatttgcacaacatttaaatcgtttattagagcaagaaattgagtttttgggttttagtcaatattcaacaaaattgcttgcagatgagctaggtaaatataactttgcggaaagtggcaccttgattttatgtcaatataatttcttagcgacagattatttgtttattgcattgcttgatagccgtcatagtatgttagtcgatgagcatttagatattcgccgtacagaatatttggatattactcagtttgatattgcggcacggataaatttgacggatttgcaagtaaacgcgaactctaatcgttatttaacctttataaaaggccgtgttggtcgcaaaattagtgatttttttatggattttttaggtgccgaagaaggattaaatccacaagttcaaaatcaatgtttattgcaagctgtgagtgattactgcgatcaaggcgaactcaacaaagagcaaactcaagcggtaaaaaaacaagtgtttgaatattgtaaaggtcagctttcaaatggtaacaatattgaattaagggaactttctgattcattacccactctaaacgaacagccttttgtcgtctttacggaagaacagaattatggtttggaagagagtattccaccaatacgttcaacattgaaatcgctaacaaaattctctgggtcaggaaagggcgttaccctaagttttgatgcggaattattgaatacacgtattcaatgggatcctatgacagataccctaaccatcaaaggcttaccgccaaatttaaaagatcaattacaaaaggctttaaaatcagagaattaa

SEQ ID NO: 1780 - protein, 297 aa, Haemophilus influenzae
MMLQLHQGYQNKAKAFGVFQEKSIFAQHLNRLLEQEIEFLGFSQYSTKLLADELGKYNFAESGTLILCQYNFLATDYLFIALLDSRHSMLVDEHLDIRRTEYLDITQFDIAARINLTDLQVNANSNRYLTFIKGRVGRKISDFFMDFLGAEEGLNPQVQNQCLLQAVSDYCDQGELNKEQTQAVKKQVFEYCKGQLSNGNNIELRELSDSLPTLNEQPFVVFTEEQNYGLEESIPPIRSTLKSLTKFSGSGKGVTLSFDAELLNTRIQWDPMTDTLTIKGLPPNLKDQLQKALKSEN

SEQ ID NO: 1781 - DNA, 219 bp, Haemophilus influenzae
atggctcaacattctaaatattctgatgctcaattaagtgcgattgtaaacgatatgatcgcagtattagaaaaacataaagcccctgtagatctttcgttaatcgcactgggtaacatggcgagtaatttattaaccaccagcgtgccacaaactcaacgtgaggcattagctcaagcattttcgaattccttaattaatgcggtaaaaacacgttaa

SEQ ID NO: 1782 - protein, 72 aa, Haemophilus influenzae
MAQHSKYSDAQLSAIVNDMIAVLEKHKAPVDLSLIALGNMASNLLTTSVPQTQREALAQAFSNSLINAVKTR

SEQ ID NO: 1783 - DNA, 1758 bp, Haemophilus influenzae
atgaaatggattaaaaaaggcaccttcagcggcaaacaataccgcgatgacgtttcacgaaaaatttcgtggggtcattggtttgccttttttaatattattgttgctatttttattggcgcacgttatgcctttatcattgactggccagatactctcgcaggaaaactttatttctttgtgagtttgctcgggcatttcagtttcaatgtttttgcgttgtacttactcgtggtctttcctctgagtttcattgttaaaaatcaccgcacttttcgcggattaaccgtgattttttccacgatttgtacaaccttattgttatttgataccgccgttttcaatcgttttaatctgcatttatcctctgttgtatggaatttgctggtcaatccagaaaatggtgaaatgtcacgcgattggcaaattttctttgcaccaatgccaataattttactggcacaaatgttattttctcgctggagttgggaaaaattacgtagtcttgaacgccaaaaatggctaaaaggcactggtatattcttaaccacaacattcatcgcgacgcatttaatttatgcttgggcagatgcttatttgtatcgtccgatcaccatgcaacgctctaatttccctttatcttatccaatgacagctcgttcttttttagaaaaacacggtttcttggatggggaagaatatacgcaaaaattggcgcaagaaggtcgtttagatgccttaaaaattgattatccgaaaaaagaactcacttatgcaccaattacgcacaaacctaatattctgctcgtaacggtttcgggtttacgccatgatgcgatttctaatgaaaagatgccaaaacttgctaaatttgcaacaagctcaacggaattcactaatcattacagcacaggcaatagtaataacgcaggcttaattgggttattttacgggctaaatgcaaattacaccgatagcattttaagcaatcatacccaatctgttttaatcgaaaaattacgtgctgaaaattatcaattgggtttattttctgctacgaatttcaaagatagcatcttccgccaagcattatttcgtgaaataaaactttcatcgaataaaaccaacaaaccaaataatgaaagtgcggtaaaaaatctcaatgattttattaaagcacaaaaaactgactcaccctggtttgcttatttggatttagccttggaggctaaaaatccatcagattatgaccgcactttgcaagacattgattctcttttagcaaaagcgttagaaagtacaccgcttgaaaatacattagtcatcatcacgtcagagcatggtttaacctttaatgaaatgaatcaaaaagagcgagaaaactactttgggcgtgatgaaattcaagtgccattgcttgtatattggaaagatttacccgtaggtaaacaaaatggattaagtaatcatgcggatattttctctgcattaatgcagacagtattccgtgtagaaaacccgttgatggattatagtcagggacgtaatctctttgagcttaagggcgatgactgggtacttgcctcgaatttccgctggaatgtggtgattcaacctgatggaacacaatatcacattgatcgcaaaggtaattacaaaaaattcgataaagattatatcgagcaatcttcagacagaccgccacttggaatcttcttagaagccttccaattacaaaatttcttctttgaaaaataa

SEQ ID NO: 1784 - protein, 585 aa, Haemophilus influenzae
MKWIKKGTFSGKQYRDDVSRKISWGHWFAFFNIIVAIFIGARYAFIIDWPDTLAGKLYFFVSLLGHFSFNVFALYLLVVFPLSFIVKNHRTFRGLTVIFSTICTTLLLFDTAVFNRFNLHLSSVVWNLLVNPENGEMSRDWQIFFAPMPIILLAQMLFSRWSWEKLRSLERQKWLKGTGIFLTTTFIATHLIYAWADAYLYRPITMQRSNFPLSYPMTARSFLEKHGFLDGEEYTQKLAQEGRLDALKIDYPKKELTYAPITHKPNILLVTVSGLRHDAISNEKMPKLAKFATSSTEFTNHYSTGNSNNAGLIGLFYGLNANYTDSILSNHTQSVLIEKLRAENYQLGLFSATNFKDSIFRQALFREIKLSSNKTNKPNNESAVKNLNDFIKAQKTDSPWFAYLDLALEAKNPSDYDRTLQDIDSLLAKALESTPLENTLVIITSEHGLTFNEMNQKERENYFGRDEIQVPLLVYWKDLPVGKQNGLSNHADIFSALMQTVFRVENPLMDYSQGRNLFELKGDDWVLASNFRWNVVIQPDGTQYHIDRKGNYKKFDKDYIEQSSDRPPLGIFLEAFQLQNFFFEK

SEQ ID NO: 1785 - DNA, 993 bp, Haemophilus influenzae
atgaaaagccatgttcgtagttttaaaacctatattcgcgatgaaattatcaaaaaaggcgggtgggtaaatgcccatgctcatgctgaccgcgcttttacgatgacgccagagaaaattgggatttatcatagtagtaacttgcaacaaaaatgggatttagtggatgaagtaaaacgcacttccagtgttgatgattattacgcacgtttttgccaatctattgaattaatgatatcccaaggtgtaaccgcatttggtacttttgtcgatatagacccaatttgtgaagatcgtgcaattattgccgcacacaaagcccgcgaagtgtataaacatgacattattttgaaatttgccaatcaaactttaaaaggggtaatcgaacccactgcgcgtaaatggtttgatattggtgcagaaatggtagatatgattggcggcttaccatatcgtgatgaattggattatggacgtggcttagaagctatggatatcttgttagataaggccaaatctcttggaattatgtgtcatgtacatgtagaccaattcaacaatccaagtgaaaaagaaaccgagcaactttgcgacaaaaccattgaacacggaatggaggggcgagttgtaggtatccatggtatttccattggctcacattcaaaagaatatcgctacaaactttacgaaaaaatgcgtaaagccaaaatgatgatgatagcctgtccgatggcatggattgacagtaatcgcaaagaagatcttatgccattccacaatgcgctcacgccagcagatgaaatgattcccgaaggtatcactgttgccctaggcacagataatatttgtgattacatggttcctctatgtgaaggcgatttatggcaagaattaagcctattagctgcgggctgccgtttccctcacttagatgaaatggtcaatatcgcaagtattaacggtcgtaaagtgttaggactagagctaatttag

SEQ ID NO: 1786 - protein, 330 aa, Haemophilus influenzae
MKSHVRSFKTYIRDEIIKKGGWVNAHAHADRAFTMTPEKIGIYHSSNLQQKWDLVDEVKRTSSVDDYYARFCQSIELMISQGVTAFGTFVDIDPICEDRAIIAAHKAREVYKHDIILKFANQTLKGVIEPTARKWFDIGAEMVDMIGGLPYRDELDYGRGLEAMDILLDKAKSLGIMCHVHVDQFNNPSEKETEQLCDKTIEHGMEGRVVGIHGISIGSHSKEYRYKLYEKMRKAKMMMIACPMAWIDSNRKEDLMPFHNALTPADEMIPEGITVALGTDNICDYMVPLCEGDLWQELSLLAAGCRFPHLDEMVNIASINGRKVLGLELI

SEQ ID NO: 1787 - DNA, 528 bp, Haemophilus influenzae
atgggcgggcaagataaaggattacagattttaggtaaacaatctttaattgaacatgttattaatcgcttacaaccacaaattcatcagatttcaattaacgctaaccgaaatcaaacagaatatgcaaaatttggctttcctgttttctccgatgaactgcccgattttcaagggccattaagtggcatgctaacagctctagaaaagacaaaaagtgactttatcctttttacaccttgtgatacgcctttttttcctatgaatcttttagataaactcaaaagtgcggttaaaaatgaccgcactttaattgcgtatgcttgcgatgaagaacgtgaacatcccgttttttgtttaatgtccgttcagctaaaggaaaaattgcgacactatttagcatcgggtgaacgacgccttttacaatttatgaaagaaaatggcgggatttcagtaaaattcacgcaagaagaaggcaacttcgagaattttaatacgctagatgatttaaagaaaacagtcatctaa

SEQ ID NO: 1788 - protein, 175 aa, Haemophilus influenzae
MGGQDKGLQILGKQSLIEHVINRLQPQIHQISINANRNQTEYAKFGFPVFSDELPDFQGPLSGMLTALEKTKSDFILFTPCDTPFFPMNLLDKLKSAVKNDRTLIAYACDEEREHPVFCLMSVQLKEKLRHYLASGERRLLQFMKENGGISVKFTQEEGNFENFNTLDDLKKTVI

SEQ ID NO: 1789 - DNA, 267 bp, Haemophilus influenzae
atgaaatgtaagcgtttaaatgaagttttggaacttttacagttttattggtctaaagactcggatttgagtttaatggaaattttgcaaaaaattgccaatgaatcaggtttccaaaaaccattaaatgaattaactgatgaagtgattatttatcagttaaaaatggatggtacagataaatatgagccaattcctggtctcaaaaaagattacgaagaagattttaaaaccgcattgctccgtgctcgcggtatcattaaataa

SEQ ID NO: 1790 - protein, 88 aa, Haemophilus influenzae
MKCKRLNEVLELLQFYWSKDSDLSLMEILQKIANESGFQKPLNELTDEVIIYQLKMDGTDKYEPIPGLKKDYEEDFKTALLRARGIIK

SEQ ID NO: 1791 - DNA, 618 bp, Haemophilus influenzae
atgaaaaaagtattacttgcgttaggtttaggtgtcagcacgcttatgtctgtaaatagttttgccgcagatttacaagaaggcaaacaatatgttcaagtgagtcaacaggcttcacagcaaaaagaagtgattgagtttttctcattctattgcccgcactgttacgcttttgaaatggaatacaaaattccacaacaagtcgtagattctttaccaaaagatgtgaaatttaaacaatatcatgtaaatttcttaggtcatcaatctgaaaacttaacacgtgcttgggcgttagcaatggcattaggtgcagaaagtaaagtaaaatcaccattatttgaagcggctcaaaaggatgccttgaaatcaatggatgatattcgagctattttcttatcgaatggcataaccgccgagcaatttgatggtggcattaatagttttgccgtgaatggtttggtgaataaacaagtgaatgcagcagaacaatttaaagtgcgtggcgtacctgatttttatgtaaatggaaaattccgcgtaaaccctgaaggtttaaattacgatgatttcgtgaaagattatgtacaaaccgtaaaaggtttattgcaaaaataa

SEQ ID NO: 1792 - protein, 205 aa, Haemophilus influenzae
MKKVLLALGLGVSTLMSVNSFAADLQEGKQYVQVSQQASQQKEVIEFFSFYCPHCYAFEMEYKIPQQVVDSLPKDVKFKQYHVNFLGHQSENLTRAWALAMALGAESKVKSPLFEAAQKDALKSMDDIRAIFLSNGITAEQFDGGINSFAVNGLVNKQVNAAEQFKVRGVPDFYVNGKFRVNPEGLNYDDFVKDYVQTVKGLLQK

SEQ ID NO: 1793 - DNA, 336 bp, Haemophilus influenzae
atggctgcaagttttagcgtaacgcgtcgtttctttgacgacaaaaactacccacgtggtttttcccgtcacggtgattacacaattaaagaatcacaggtgcttgagcaatatggtcaagcgttcaaagcattagacttaggggaacgtgagccagcgactaaagaagaaaaagatttcgtcgcattttgccgtggtgatcgcgcagcagagactttctttgaaaaaacttggaataaatatcgtactcgtattaacactaaaaaacgtgtttacaccttatctagtgatgtgagtgaagttgcctctggcggtgaagattattccggcgaataa

SEQ ID NO: 1794 - protein, 111 aa, Haemophilus influenzae
MAASFSVTRRFFDDKNYPRGFSRHGDYTIKESQVLEQYGQAFKALDLGEREPATKEEKDFVAFCRGDRAAETFFEKTWNKYRTRINTKKRVYTLSSDVSEVASGGEDYSGE

SEQ ID NO: 1795 - DNA, 1092 bp, Haemophilus influenzae
atgcaattaccgatttctcaatacaacgaactgctacaaaaaaaacttgaaaaattaaccgcacttttacacccttttaatgcacccgatattcaagtttttgactctccaacaagtcattatcgcatgcgtgcggagtttcgtatttggcacgaacaagatgatttttaccatattatgtttgatcaagcgacgttgcagcgttatcgcgtggatgaatttccaatcgccagcatgctaattaatcgtatgatgcaaaccttattacctttgttaaaacaacaagaagtgctacacaaaaaattattccaaattgattaccttagcaccttgagtaataagattattgtgagcttgctttatcataaaacactcactgaggaatgggaaagtgcggctaaaaatttgaaagatttactcgaaaagcaagattttgatgtgcaaataatcgggcgtgcaagtaaacaaaaaatctgttttgagcaagattatgtggacgaagttttacctgtgaatggcagaaattatgtctatcgccaagtcgagaatagttttacccagccaaacgcaacggtaaactgcaaaatgcttgaatgggcaattgattgtacccaaaatagcgaaggtgatttattagaactttactgcggaaacggtaatttttctatcgcacttgcacaaaatttccgtaaggtattggcaacagaaatcgccaaaccttctgtagccgccgcacaatttaatattgctgaaaataaagtggataatttacaaattatccgtatgtcggcagaggaatttacgcaggcaatgaatggggttagagcctttaaccgcttgaaaggaattgatttaaaatcttatgaatgtaataccatttttgtcgatccacctcgcgcggggcttgatcctgatacagtgaaacttgtacaaaattacgatcgcattttgtatatttcctgtaatccacatacgcagtgtgataatcttgttgaactttcaaaaacgcaccgcattgaaaaagcggcgttatttgaccaattcccttacactgatcacatggaaagcggcgtatggctcattcgcaagtag

SEQ ID NO: 1796 - protein, 363 aa, Haemophilus influenzae
MQLPISQYNELLQKKLEKLTALLHPFNAPDIQVFDSPTSHYRMRAEFRIWHEQDDFYHIMFDQATLQRYRVDEFPIASMLINRMMQTLLPLLKQQEVLHKKLFQIDYLSTLSNKIIVSLLYHKTLTEEWESAAKNLKDLLEKQDFDVQIIGRASKQKICFEQDYVDEVLPVNGRNYVYRQVENSFTQPNATVNCKMLEWAIDCTQNSEGDLLELYCGNGNFSIALAQNFRKVLATEIAKPSVAAAQFNIAENKVDNLQIIRMSAEEFTQAMNGVRAFNRLKGIDLKSYECNTIFVDPPRAGLDPDTVKLVQNYDRILYISCNPHTQCDNLVELSKTHRIEKAALFDQFPYTDHMESGVWLIRK

SEQ ID NO: 1797 - DNA, 774 bp, Haemophilus influenzae
atggctcattcgcaagtaggtattcagctgatttctgaatcgacagaaaaaacattagcagaattgaccgcactttgtgctgaacacaacattattcatgatgaacaaagtccacttgcgcttgttcaaatcgatgaacgtttagagcttcgtaaattagacgaacctaaactcggggctgtttatgttgattttgttggtggcacaatggctcaccgtcgtaaattcggtggtggacgtggagaagccgtagcgaaagcagtagggattaaaggttcggcattgccaacggttattgatgcaacagctggtctaggacgtgatgcctttgtgttagccgcagttggctgccaagttcgtttagtagaacgccatcctgttgtttttttacttctgcaagatggtttaaatcgtgcttatcaagatgaggaaatcggcgagatgttgcaacaaaatttgcgcttgctgaatgttcagcatattaatgaacttgatcctaatagcgattatgccgatgtggtttatctcgatccaatgtatccgcataaacaaaaatctgcactagtaaaaaaggaaatgcgagtattccagcatttagtcggggctgatgtagatgctgatgaattgcttttacctgcactacaattagctaaaaaacgtgtggtcgtgaagcgtcctgactatgcggaatttctttgtggaaaacaaccgcactttagccgtgaaacgaaaaatcatcgctttgatatttatatgggagcatcccaatgctaa

SEQ ID NO: 1798 - protein, 257 aa, Haemophilus influenzae
MAHSQVGIQLISESTEKTLAELTALCAEHNIIHDEQSPLALVQIDERLELRKLDEPKLGAVYVDFVGGTMAHRRKFGGGRGEAVAKAVGIKGSALPTVIDATAGLGRDAFVLAAVGCQVRLVERHPVVFLLLQDGLNRAYQDEEIGEMLQQNLRLLNVQHINELDPNSDYADVVYLDPMYPHKQKSALVKKEMRVFQHLVGADVDADELLLPALQLAKKRVVVKRPDYAEFLCGKQPHFSRETKNHRFDIYMGASQC

SEQ ID NO: 1799 - DNA, 435 bp, Haemophilus influenzae
atgctaagagaaagtgccgttgttattagctatgaaaatggcattgccaaagtgaaatgccaatcccaaagtgcctgtggccaatgcgcagctaaaaacagttgtggaacatcaagcctttccgaattaaacggtaaacgtggcgagcatatttttaatgtggaaacattaatgccattacgcgaaggtcaaattgttgaaattggattagaagaaaagtcgatgttgttatccgcattattgatgtatgttgtaccgcttttgaccttattgattgtgactatgttgtccgattacataagcgataatgaaattctgcgtgccattttaatctttggattaaccgcactttctttcatatttgtaaaatcttatagcagaaaattaggacaacaaacagaatttcagcctgttttattgcgtgtattatcttga

SEQ ID NO: 1800 - protein, 144 aa, Haemophilus influenzae
MLRESAVVISYENGIAKVKCQSQSACGQCAAKNSCGTSSLSELNGKRGEHIFNVETLMPLREGQIVEIGLEEKSMLLSALLMYVVPLLTLLIVTMLSDYISDNEILRAILIFGLTALSFIFVKSYSRKLGQQTEFQPVLLRVLS

SEQ ID NO: 1801 - DNA, 516 bp, Haemophilus influenzae
atgaacaatcagattcctttacttggaattaccggttatagcggtagtggtaaaacaacattattagaaaaacttattccagaacttatcgctcgtcacattcgcgtttcagtgattaaacatagccatcacaatatgcaagttgataaagaaggaaaagatagttggcgtatgaaagaggcgggttcttctcaagtcattttagcgaatgatgaacgctgggcgattatgacggaaacgtcaaagcctgtttcattggattatttagcgcaacaatttgaccgcactttaacggatttagtgttggtggaaggctttaaacaagagccaattccaaagattttgctccatcgtcaagaaatgacaaaacctttacccgaaattgacgaatatgtgctcgcagttgcaacgaattatccccttgaaattgaccgcactttgttggatattaaccgcattccgcaaattgccgattttattgaaaattggttgcaccattttcacggagcacgatga

SEQ ID NO: 1802 - protein, 171 aa, Haemophilus influenzae
MNNQIPLLGITGYSGSGKTTLLEKLIPELIARHIRVSVIKHSHHNMQVDKEGKDSWRMKEAGSSQVILANDERWAIMTETSKPVSLDYLAQQFDRTLTDLVLVEGFKQEPIPKILLHRQEMTKPLPEIDEYVLAVATNYPLEIDRTLLDINRIPQIADFIENWLHHFHGAR

SEQ ID NO: 1803 - DNA, 1344 bp, Haemophilus influenzae
atggcactttttatgcaaagcctcgatgcgaccattctaaatacagctttacccgcgatatcttccgatttacataaacccgcctttgaaatgcaaatggcgatcatcgcttattctttagctgttgcattatttattcctcttaccgcttgggctgcggcaaaatttgggacattgaccgtttttcgtagtgcagttttcacgtttattttaggttcagttgcttgtgccgcggcctctaatttagagagccttattttagcccgagtgattcaggggataggcggtgcctttatgatgccggtggcgcgtttagctattattcaagctgtccccaaacaacaattagtgaatgcttggaatttaatggcaactgcaggtttgattgggccaattctagggcctattttaggtggatggttagtcattcacgccagttggcactggatttttttaattaatattccaattggtgcgctaggaattttggcatcgggcagcgtgatgaacaatatcaagggcgaggcagagaaattagattggacaggttttttactctttgcattagggttagttggtattacgcttggtttggatttactcggagaaagtcagcataattcaagtgtaacttatagcatattagttgttggtattctgttactcgtaacttattgtggctatgctaaaaacaatgaaaatgccattttacctttatcccttttccgaactcgtacattcagattaggtattattgccaatatttttatccgattatctgcatctggcgttccctttttattgcctttgatgttccaattatctttcggttacagtgccgaaatgtctggctggctattagcaccgattgcgttaatttctgtgatgttgaaaatattaattggacgaattttaaatcgttggggctataaaacaacgctaatttcatccgcacttttgatggcaggttctgtgatttcaatggcttggttagataaacaaagttctttaacttggattatttgtaatcttatgtggtatggggcttgtatgtcgatcatttttacttcaattaatacgctggctgtaggcgatctttcaaaacaacagtctggcacaggctctaccgtattaagtattgtacagcaagttgggattggatttggtattgctgtgtcatcaataatcttaaatctttatcgacatttctttagcgaaagtgatggcttacaacaggcattcagctatacttttttaacttcatcactttttgtaatcgcccttgtttggtcgcttatgaaattacacaaaaatgatggcgatcatttacgaaaaatgccttag

SEQ ID NO: 1804 - protein, 447 aa, Haemophilus influenzae
MALFMQSLDATILNTALPAISSDLHKPAFEMQMAIIAYSLAVALFIPLTAWAAAKFGTLTVFRSAVFTFILGSVACAAASNLESLILARVIQGIGGAFMMPVARLAIIQAVPKQQLVNAWNLMATAGLIGPILGPILGGWLVIHASWHWIFLINIPIGALGILASGSVMNNIKGEAEKLDWTGFLLFALGLVGITLGLDLLGESQHNSSVTYSILVVGILLLVTYCGYAKNNENAILPLSLFRTRTFRLGIIANIFIRLSASGVPFLLPLMFQLSFGYSAEMSGWLLAPIALISVMLKILIGRILNRWGYKTTLISSALLMAGSVISMAWLDKQSSLTWIICNLMWYGACMSIIFTSINTLAVGDLSKQQSGTGSTVLSIVQQVGIGFGIAVSSIILNLYRHFFSESDGLQQAFSYTFLTSSLFVIALVWSLMKLHKNDGDHLRKMP

SEQ ID NO: 1805 - DNA, 1644 bp, Haemophilus influenzae
atgaaactaaaagcaacattaactctcgccgctgcaactcttgttttggcagcttgtgatcaatctagctcggcaaataaatctactgctcaaactgaagcaaaatcctcgtcaaataatactttcgtttattgcacagcgaaagctccattgggatttagccctgcgttaataattgaaggtacttcttataatgcaagctcacaacaagtgtataaccgcttagttgaatttaaaaaaggctcaacggatattgaaccagctttagctgaaagctgggaaattagcgatgatggtttaagttatacttttcatttaagaaagggtgttaaattccacacaacaaaagaatttaccccgacacgtgattttaatgcagatgatgttgtattttcattccaacgtcagttagatccaaatcatccatatcacaatgtatctaaggggacttatccatattttaaagcaatgaaattccctgaattgttgaaatcagtggagaaagtagacgataacacaattcgtattaccttaaataagaacgatgcgactttcttggctagtcttggtatggattttatttctatttattctgcagaatatgctgattcaatgctgaaagcgggtaaaccagaaacgcttgatagtcgcccagtggggacaggcccttttgtttttgtggattataaaacagatcaagccatacaatatgttgcgaatgaaaattattggaaaggtagaacacctttagatcgtttagtcattagcattgtgcctgatgcaacaacacgttatgcaaaattacaggcgggtacttgcgatttaattttattcccaaatgtagcggatttagccaaaatgaaaaccgatccaaaagtacaacttttggaacaaaaaggtttgaacgtagcgtatatcgcattcaataccgaaaaagcaccgtttgataatgtcaaagtgcgccaagcgttgaattacgcagtggataaaaaagcgattattgaagcggtttatcaaggtgcaggaatatcagctaaaaacccacttcctccaacaatttggagttataatgatgaaatccaagattatccgtacgatccagaaaaagcaaaacaacttttagtagaagctggttatccaaatggttttgaaactgatttctggattcaacctgttattcgtgcttctaatccaaatccaaaacgtatggctgaattaattatggcggattgggcgaaaattggtgtaaaaactaacccagtgacttatgaatgggctgattatagaaaacgagcaaaagagggagaattaactgcgggtatctttggttggtctggcgacaatggcgatcctgataatttcttatccccattattaggtagctcaaatataggtaattctaatatggcacgtttcaataattcagaatttgatgctttactcaatgaggctattggattaaccaataaggaagaacgtgcgaaactttataaacaagctcaagttattgtccataatcaagcaccttggattccagttgcccactctgttggttttgcgccacttagtcctcgcgtaaaaggttatgtacaaagcccatttggctatgacgctttttatggtgtgagtgttgatggtaaataa

SEQ ID NO: 1806 - protein, 547 aa, Haemophilus influenzae
MKLKATLTLAAATLVLAACDQSSSANKSTAQTEAKSSSNNTFVYCTAKAPLGFSPALIIEGTSYNASSQQVYNRLVEFKKGSTDIEPALAESWEISDDGLSYTFHLRKGVKFHTTKEFTPTRDFNADDVVFSFQRQLDPNHPYHNVSKGTYPYFKAMKFPELLKSVEKVDDNTIRITLNKNDATFLASLGMDFISIYSAEYADSMLKAGKPETLDSRPVGTGPFVFVDYKTDQAIQYVANENYWKGRTPLDRLVISIVPDATTRYAKLQAGTCDLILFPNVADLAKMKTDPKVQLLEQKGLNVAYIAFNTEKAPFDNVKVRQALNYAVDKKAIIEAVYQGAGISAKNPLPPTIWSYNDEIQDYPYDPEKAKQLLVEAGYPNGFETDFWIQPVIRASNPNPKRMAELIMADWAKIGVKTNPVTYEWADYRKRAKEGELTAGIFGWSGDNGDPDNFLSPLLGSSNIGNSNMARFNNSEFDALLNEAIGLTNKEERAKLYKQAQVIVHNQAPWIPVAHSVGFAPLSPRVKGYVQSPFGYDAFYGVSVDGK

SEQ ID NO: 1807 - DNA, 762 bp, Haemophilus influenzae
atggatttcaatcgaattattactcatatgaatgatcatcatcaagatgatatggctgccctttgtaaaaaatttggtggcgaaaaggaaatcacagatgtgacgttagttaatgtagattttgctggtttagattttaaatataatggtggcaaaacattacgtgtggaatttccacaacaagctgacgcaggttcaattaaacaagcaatcatcaatctttgtgtagaaaataaaccagttgcaaattacgatcgtatcaaggctaaaattgatgaatttcgtcaagagtttaaaagctgtgtgctttctactttagataaagatggcttaccgatggcgtcttatgcaccaattattttctttgatggaaaatattatatttatatcagtgccattgcagagcattatgagaatttaaaacgcaatccaaatcaagtagaagtgatgtttttagaagatgaaaacaaagcgaagtcaattattgtgcgtactcgcttacgttataaagcaagtgcacgttttattcctcgtgaagatccaattgttgaaaaagtcttagataaattagccgaaactatgaatgatgtaggcggaattaaaacaattcgtgaatttactgattttgatttagttgaacttacatttggaacaggccgttttgtaagaggttttggccaagcttatttgattgatgctaatggggaaatttctcatattggtgtcaaaggcaatccacacgaaaaagaaagtgataaataa

SEQ ID NO: 1808 - protein, 253 aa, Haemophilus influenzae
MDFNRIITHMNDHHQDDMAALCKKFGGEKEITDVTLVNVDFAGLDFKYNGGKTLRVEFPQQADAGSIKQAIINLCVENKPVANYDRIKAKIDEFRQEFKSCVLSTLDKDGLPMASYAPIIFFDGKYYIYISAIAEHYENLKRNPNQVEVMFLEDENKAKSIIVRTRLRYKASARFIPREDPIVEKVLDKLAETMNDVGGIKTIREFTDFDLVELTFGTGRFVRGFGQAYLIDANGEISHIGVKGNPHEKESDK

SEQ ID NO: 1809 - DNA, 348 bp, Haemophilus influenzae
atgaatttagaaagacttaacgaaattgaaaaaccattactccacatcgttaaacacgatgttgtgccagccctaggctgtaccgaacccatttctcttgcgctcgcatctgctacagctgcgaaatatttaggcaaaacacctgaacgcattgaagcaaaagtttcgcctaatctgatgaaaaatggattgggcgttgctgtgcctggaactggcatggttggattgcctattgctgcggcaatgaaggtattgtcgaacacgatcttgatcgaactattgataatttctgcgctattgcatcaaaaagtatgcaacatatcgatagacaggttatcgaaattatag

SEQ ID NO: 1810 - protein, 115 aa, Haemophilus influenzae
MNLERLNEIEKPLLHIVKHDVVPALGCTEPISLALASATAAKYLGKTPERIEAKVSPNLMKNGLGVAVPGTGMVGLPIAAAMKVLSNTILIELLIISALLHQKVCNISIDRLSKL

SEQ ID NO: 1811 - DNA, 2808 bp, Haemophilus influenzae
atgacccaaattgcaacaaatccgcttgtgctagtggatggttcttcttatttatatcgtgcatttcatgcctttccacctttaaccaatgccgcaggtgagccaacaggtgcgatgtacggcgtgttaaatatgttaaaaagcctcatctcacaagtacagccctctcatatagccgttgtttttgatgcaaaagggaaaacatttcgcgatgaaatgtttgaacactataaatctcaccgtccaccaatgcctgatgatttacgcaaacaaattcagcctttgcacgatatgattcgtgcattgggcattccgcttttagtggtggaagggattgaggcagatgatgtaatcggcacactcgcactacaagcatctcgtttgggtaaaaaagtgctcattagtactggcgataaagatatggcacagttagttgataacaatattatgctcatcaacaccatgaataatagcctattggatcgtgagggtgtgattgaaaaatacggtattccacctgaactcattattgattatctcgcacttatgggcgatagtgcagataacattcctggcgttgctggcgtgggcgaaaaaaccgcacttggtttactacaaggcataggaagcatggctgaaatttatgccaatcttgaaaaagtagcggaactgccaattcgtggtgcgaaaaaactaggtgaaaaattattggctgaaaaatccaatgccgctctttcttatacattagcaaccatcaaaacggatgttgaacttaacgtgacaacagatgaattgttgcttggagaaagccaaaaggatcaactcattgaatattttgctcgctacgaatttaaacgctggcttaatgaagtgatgaatggctcagattctattactcaaaccactgaacagccagtgaaaatcaaccagtatcaggcgacctcaccagctcaaagttctgtgggaaatagtgcggtggaaaatacgcctaaaattcaaatcgatcgtactaaatatgaaaccttgctcactcaagcggatttaacccgctggattgaaaaactcaatacagcaaaactcattgcggtcgatactgaaacagacagtcttgattatatgtctgcgaatttagtgggtatctcttttgctcttgaaaatggcgaagctgcttatttaccattgcaattggattatttggatgcaccaaaaacactcgaaaaatcgaccgcacttgccgctatcaaaccaatcttagaaaatcctaatattcacaaaattggacaaaacattaaatttgatgaaagtatttttgcccgtcatggcattgaattacaaggtgttgaatttgatacgatgttgctttcctatacgctaaatagtacgggtcgtcataatatggacgatttagccaaacgttatttaggtcatgaaactatcgcatttgaaagccttgcaggaaaagggaaaagtcagcttacgtttaatcaaattccattagaacaagccacagaatacgcggcagaagatgctgatgtgacaatgaaattacaacaagcactgtggttgaaactgcaagaagaaccaacgcttgttgaattgtataaaacaatggaattaccattgcttcatgtgctttctcgtatggaacgtacaggcgttttgattgatagtgatgctctctttatgcaatctaacgaaattgcctcaagattaaccgcacttgaaaaacaagcttacgcattagcgggccagccattcaatttagcctccaccaaacaattacaagaaattttgttcgataaacttgggctacctgttttacaaaaaacgcccaaaggtgcaccatcaacaaatgaagaagtattggaagaattatcctatagccacgaattacccaaaattttggttgaacatcgtgggttgagcaaacttaaatccacttacacggataaactgcctcaaatggtcaattcacaaacaggccgagtgcatacctcttatcatcaagcggtgacggcgacagggcgtttatcatctagcgatccaaacctacaaaatatcccaattcggaatgaagaaggtcgtcgtattcgacaagcatttatcgcgcgtgaaggttattctattgtcgccgctgactattctcaaattgagttacgcattatggcgcatctttctggcgatcaaggcttaattaacgctttctcgcaaggcaaggatattcatcgctccaccgcagctgaaatcttcggtgtatcattagatgaagtcaccagcgagcaacgtcgcaatgctaaagcgattaatttcggcttaatttatggaatgtccgcctttggactttcacgccaacttggcatttcccgtcctgatgcacaaaaatacatggatttatatttccaacgctatcctagcgtacaacaatttatgaccgatattcgtgaaaaagcgaaaacacaaggctatgtggaaacactatttggtcgccgtttatatttaccagatattaattctagcaatgcaatgcgtcgtaaaggagcagaacgtgtggcaatcaatgcaccgatgcaaggcacggctgcggatattattaaacgagcgatgattaaacttgatgaagtaatccatcacgatccaaatattgaaatgattatgcaagtacatgatgaattagtgtttgaagtgcggtcagaaaaagtcgcgtttttccgtgagcaaattaaacaacacatggaatccgctgctgaattagttgttccgttgattgtggaagtgggtgttggacaaaattgggatgaagcgcattaa

SEQ ID NO: 1812 - protein, 935 aa, Haemophilus influenzae
MTQIATNPLVLVDGSSYLYRAFHAFPPLTNAAGEPTGAMYGVLNMLKSLISQVQPSHIAVVFDAKGKTFRDEMFEHYKSHRPPMPDDLRKQIQPLHDMIRALGIPLLVVEGIEADDVIGTLALQASRLGKKVLISTGDKDMAQLVDNNIMLINTMNNSLLDREGVIEKYGIPPELIIDYLALMGDSADNIPGVAGVGEKTALGLLQGIGSMAEIYANLEKVAELPIRGAKKLGEKLLAEKSNAALSYTLATIKTDVELNVTTDELLLGESQKDQLIEYFARYEFKRWLNEVMNGSDSITQTTEQPVKINQYQATSPAQSSVGNSAVENTPKIQIDRTKYETLLTQADLTRWIEKLNTAKLIAVDTETDSLDYMSANLVGISFALENGEAAYLPLQLDYLDAPKTLEKSTALAAIKPILENPNIHKIGQNIKFDESIFARHGIELQGVEFDTMLLSYTLNSTGRHNMDDLAKRYLGHETIAFESLAGKGKSQLTFNQIPLEQATEYAAEDADVTMKLQQALWLKLQEEPTLVELYKTMELPLLHVLSRMERTGVLIDSDALFMQSNEIASRLTALEKQAYALAGQPFNLASTKQLQEILFDKLGLPVLQKTPKGAPSTNEEVLEELSYSHELPKILVEHRGLSKLKSTYTDKLPQMVNSQTGRVHTSYHQAVTATGRLSSSDPNLQNIPIRNEEGRRIRQAFIAREGYSIVAADYSQIELRIMAHLSGDQGLINAFSQGKDIHRSTAAEIFGVSLDEVTSEQRRNAKAINFGLIYGMSAFGLSRQLGISRPDAQKYMDLYFQRYPSVQQFMTDIREKAKTQGYVETLFGRRLYLPDINSSNAMRRKGAERVAINAPMQGTAADIIKRAMIKLDEVIHHDPNIEMIMQVHDELVFEVRSEKVAFFREQIKQHMESAAELVVPLIVEVGVGQNWDEAH

SEQ ID NO: 1813 - DNA, 303 bp, Haemophilus influenzae
atgtcgttaaaattggtcgaaattttagttttgggtcaggttttgcgtttaaatgtacccattgaacaagaagaattactgcgccaagctgcgcgtaatttagatatattggtttccgaaatgaaagaaaagacaggccttattcagcttgatcgtgtgctttctattgtggcactcaatttgagttttgaattaagccaagaaaaaaataaaacggctaaaattgaagaggtattgagaacgggtatccaacaattagatcattcattagaaaatattcgtgttacaaaagaaccgagttaa

SEQ ID NO: 1814 - protein, 100 aa, Haemophilus influenzae
MSLKLVEILVLGQVLRLNVPIEQEELLRQAARNLDILVSEMKEKTGLIQLDRVLSIVALNLSFELSQEKNKTAKIEEVLRTGIQQLDHSLENIRVTKEPS

SEQ ID NO: 1815 - DNA, 564 bp, Haemophilus influenzae
atgaatactcaaaaacgccagcaaatccgcactgaaatccgaaaaatacgtgcaaatttaaccgcacttcaacagcaccaagctgaacaatcagttactcaacaggcgttaaatcttatcgagcaacgacaagccaaaaatattgcattatatttttcttttgatggtgaaatttcgacaaaagccttaatccaatccctgtggatgcaaaataaaaatgtgtatttgcctgttttacatccttttactaaacactatttattgtttttacgctatttacctgatacgccaatgaaacaaaatcagtttggcatttgggagccaaagctaaatgttcaaaatgttttgccattaaatgaactggatattttatttacgccattggtggcttttgataaaaaaggaaatcgccttggtatgggcggtggattttatgatcgcacgttgcagaattggcaaaataagtcttttattccagttggtttagctcatcaatgtcagcaagtagaaaatcttcccactgagcattgggatgtgccactattcgatattttggtaggttga

SEQ ID NO: 1816 - protein, 187 aa, Haemophilus influenzae
MNTQKRQQIRTEIRKIRANLTALQQHQAEQSVTQQALNLIEQRQAKNIALYFSFDGEISTKALIQSLWMQNKNVYLPVLHPFTKHYLLFLRYLPDTPMKQNQFGIWEPKLNVQNVLPLNELDILFTPLVAFDKKGNRLGMGGGFYDRTLQNWQNKSFIPVGLAHQCQQVENLPTEHWDVPLFDILVG

SEQ ID NO: 1817 - DNA, 2571 bp, Haemophilus influenzae
atgaacattgaaaaatttacgacaaaattccaagaagcgttaagcgaagcacaatcacttgctatcggaaaagacaatcaatttattgaacctgtgcatttattgaccgcacttttaaatcaacagggcggctctattgcgccaattttgacagcaagtggcgtaaatgtggctttattgcgtaatgaattaaagacagaactaaataaattgccgcaagtgattggcaatggtggagatgtacaactttcacgccagcttattaatctacttaatttatgcgataaattcgcacagcaaaaccaagataaatttatttcgagcgaattgtttttgcttgcagctttagaagaacgaggaacgatcagcgatattttgaaaaagtgcggtgcgaaaaaagaacaaatttcgcaagctattcagcacattagagggggacaaaacgtgaacgatcaaaatgcagaagaaagcagacaagctcttgaaaaatatacgattgatttaaccgctcgtgcagaaagtggcaaacttgatcctgtaattgggcgtgatgaagaaattcgtcgagctattcaagtattacaacgtcgtaccaaaaacaacccagtgttaattggtgaaccaggtgtagggaaaacggcgattgtcgaaggcttggcacaacgcatcgtaaacggcgaagtgccagaaggtttgaaaaataaacgtgtgctttcattagatatgggcgcattgattgctggtgcaaaatatcgcggagaatttgaagaacgcttaaaagctgttttaaatgagttatcaaaagaagaaggtcgcgtgatcctctttattgatgaaattcatactatggtcggcgcgggtaaaacagatggcgcaatggacgcaggtaacttgttaaaaccaagtttggcacgaggcgaattacattgcgtgggtgcaactactttagatgaatatcgtcaatatatcgaaaaagatgccgcacttgaacgccgtttccaaaaagtctttgtggacgaaccaagtgtagaagataccattgcgatcttacgtggtttgaaagaacgttatgaaattcatcatcacgtggatattactgacccggcaattgtcgctgcagcaacgctttcacatcgttatatttccgatcgtcagttaccagataaagccattgatttgatcgatgaagcagcgtctagcattcgtatggaaatagattctaaacctgaaccgcttgatcgtcttgaacgtcgaattatccaattaaaattggaacaacaagcgttacaaaaagaagaagacgaagcaagtcgcaaacgtttagaaatgttagagaaagaattggctgaaaaagaacgtgaatatgctgaacttgaagaagtgtggaaatctgaaaaagcaacgctttctggctctcaacatattaaacaagaattagatactgcaaaaaccgaactagaacaagctcgtcgcgcgggtgatttagcgaaaatgtctgagttgcaatatggccgcatccctgatcttgaaaagcaacttgagcaagctgaaaccagcgaaggaaaagaaatgacgcttttacgctatcgcgtcacagatgaagaaatcgcagaagtgctttctaaagccacaggcattcctgtatcaaaaatgatggaaggcgagaaagaaaaacttttgcgtatggaagaagaattgcataaacgtgttatcggacaaaacgaagccgtggatgccgtggcgaatgctattcgtcgtagccgtgcaggtctttccgatcctaatcgcccaattggttctttcttgttcctagggccaacaggtgttggtaaaacagagctttgcaaaactttggctaaattcttgtttgatagtgaagatgcgatggtgcgtattgatatgtcagagtttatggaaaaacacagtgtttctcgtttagttggtgcgcctccaggctatgtcggctatgaagaaggtggttacttaactgaagctgttcgtcgtcgtccatattcagtgatcttattagatgaagttgaaaaagcccatgcggatgtattcaacattttattacaagtattggatgatggtcgtttgactgatggtcaaggtcgtactgtggacttccgtaacactgtggttattatgacctctaacttgggttctgatttaatccaaggtaataaagacgaaagctatagcgaaatgaaagccttagtgatgtcagtggttagccaacatttccgcccagaatttatcaatcgtattgacgaaactgtggtattccatccacttggtaaagaaaatatccgtgcgattgcaagtatccaattagaacgcttagcaaaacgtatggaaactcgtggctatgaattagtgtttaccgatgctttattagacttcattggcgaagtgggatacgacccaatttacggtgcacgtccattgaaacgtgcaattcaacaagaaattgaaaacagtttggcacagcaaattctatctggtgcgttattacctggtaaggttgttaccattgattacgccaacgcagaagttcaagcgagacaatag

SEQ ID NO: 1818 - protein, 856 aa, Haemophilus influenzae
MNIEKFTTKFQEALSEAQSLAIGKDNQFIEPVHLLTALLNQQGGSIAPILTASGVNVALLRNELKTELNKLPQVIGNGGDVQLSRQLINLLNLCDKFAQQNQDKFISSELFLLAALEERGTISDILKKCGAKKEQISQAIQHIRGGQNVNDQNAEESRQALEKYTIDLTARAESGKLDPVIGRDEEIRRAIQVLQRRTKNNPVLIGEPGVGKTAIVEGLAQRIVNGEVPEGLKNKRVLSLDMGALIAGAKYRGEFEERLKAVLNELSKEEGRVILFIDEIHTMVGAGKTDGAMDAGNLLKPSLARGELHCVGATTLDEYRQYIEKDAALERRFQKVFVDEPSVEDTIAILRGLKERYEIHHHVDITDPAIVAAATLSHRYISDRQLPDKAIDLIDEAASSIRMEIDSKPEPLDRLERRIIQLKLEQQALQKEEDEASRKRLEMLEKELAEKEREYAELEEVWKSEKATLSGSQHIKQELDTAKTELEQARRAGDLAKMSELQYGRIPDLEKQLEQAETSEGKEMTLLRYRVTDEEIAEVLSKATGIPVSKMMEGEKEKLLRMEEELHKRVIGQNEAVDAVANAIRRSRAGLSDPNRPIGSFLFLGPTGVGKTELCKTLAKFLFDSEDAMVRIDMSEFMEKHSVSRLVGAPPGYVGYEEGGYLTEAVRRRPYSVILLDEVEKAHADVFNILLQVLDDGRLTDGQGRTVDFRNTVVIMTSNLGSDLIQGNKDESYSEMKALVMSVVSQHFRPEFINRIDETVVFHPLGKENIRAIASIQLERLAKRMETRGYELVFTDALLDFIGEVGYDPIYGARPLKRAIQQEIENSLAQQILSGALLPGKVVTIDYANAEVQARQ

SEQ ID NO: 1819 - DNA, 741 bp, Haemophilus influenzae
atgtcagaacaaatctacggcattcatgctgttaatagtattttaacccattcgccagaacgtttaattgaagtcttcgtacttaaaggccgtgaagataaacggctacagccactcttaaacgaactgtattccctcggaattggtgtgcaatttgttaatcgccaaactcttgataaaaaagccgatggtgaagttcatcaaggtgtcattgctcgagtacaagcggcaaaagaacttaatgaaaatgatcttgatgaaattcttgcaaataaacaaaatccgcttttattagttttggatggcgtgactgacccgcacaacttgggagcatgtttgcgaacagcggatgcagcgggcgcaatggcagtgatcgcaccgaaagataaatctgcacaattaacatctattgcacgtaaagttgcttgtggcgcggcagaaaccgtgccgttaattcgtgtaaccaatctttctcgcacactgcgcgatttacaacaaaatcataacatttgggtagttggcactgctggcgaagccactgaaaccatttatcaaagcaaactgacaggaccactagcacttgttatgggagccgaaggcgaaggaatgcgtcgtttaacacgtgaacattgcgatcaactgattagtattccaatggctggttcagtttcatcattaaatgtatctgtcgcaacaggggtatgtttatttgaaattgcacgtcagcgtttaggttcataa

SEQ ID NO: 1820 - protein, 246 aa, Haemophilus influenzae
MSEQIYGIHAVNSILTHSPERLIEVFVLKGREDKRLQPLLNELYSLGIGVQFVNRQTLDKKADGEVHQGVIARVQAAKELNENDLDEILANKQNPLLLVLDGVTDPHNLGACLRTADAAGAMAVIAPKDKSAQLTSIARKVACGAAETVPLIRVTNLSRTLRDLQQNHNIWVVGTAGEATETIYQSKLTGPLALVMGAEGEGMRRLTREHCDQLISIPMAGSVSSLNVSVATGVCLFEIARQRLGS

SEQ ID NO: 1821 - DNA, 2349 bp, Haemophilus influenzae
atgacaaaaaaacgtaaaaacttaatcaaccaagatcctcattacaaacgagaattggaaaaatacggcaatccaatcccgagccgtgaatttattttaagcgttattcgagacaataatgcaccgatgaatcgggatgaaattttgaccgcactttccattcgaaatgaagatcaagtagaagcgatgcgtcgccgattacgtgcgatggaaaatgatgggcaattagtgttcactaaacgtaaacgctatgccttaccagaaaaattagatttatttaaaggtacggtaattggtcatcgcgaaggttttggttttttacaggtcgatggcaaaaaggatgatttattcattccaaaccatcaaatgcaaagagtcatgcatggagattttgtcttagcgcaacctgctggattagatcgtcgtggtcgccgtgaagtgcgaattgtgcgcgtattagaaagtcgtaaaaaacaaattgtgggtcgctttttcttagaaaacggttttagctatgtggtgcctgatgacagtagaattggtcgagatattctcgtgccaaatgaacatcgtaatggtgcacgtatgggacaagttgtggttgtcgagttgcaaaaacgttctgccagttttaaccagccaattggcgtaatcactgaaattctaggcgataatatggcaaaaggaatggaagtggaaatcgccttgcgtaaccacgatattccccataagtttccaagtgcggtggaaaaatatgttaaaaaattcactgaagaagtgcctgaagaagcaaaaaaagggcgtgtggatttacgcaatttaccgcttgtgaccattgatggcgaagatgcgcgggattttgatgatgccgtttattgtgaaaaacacggcaaaggctggaaactttgggtcgcgattgcagatgttagttattacgtacgtttacgttccgctttggatgtagaagcgcataatcgtggtaactcggtctattttccaaaccgagttgtaccaatgctacctgaaattttatcgaacggattatgctctctaaacccacaagtggatcgtttgtgtatggtgtgtgagatgcaaatgtctgccaaaggtaagctaacagattatcgcttttatgaggcggtgatgaattctcacgcccgcctcacttataccaaagtagccaaaatgcttgaaggcgatgaagaattacgcgctcgttattctacgcttgtgcctcatttagaagagctttataaactctatcaagcgttgcttggtgcgcgtcatcaacgtggtgcgatcgattttgaaaccattgaaactaagtttatttttaatgcaatggggagaattgagcgtattgaacccgttgttcgcaatgatgcccacaaaatcattgaggaatgtatgattcttgcgaatatcgcggcagctaattttatggaaaaacataaagagcctgcgttatatcgtattcatgccaccccgatcgaagaaaaattaacatcgttccgcactttcttaagtgagtttggtttaactttagaaggtggcttaaaaccaactacaaaagactatgctgcgctcttagaaaaaattaaagaacgacctgatcatgaacttattcaaacaatgttgctacgttcattaagtcaagccgtctatcatgctgataatattgggcattttggtttggctttggaagaatatgcacactttacttcgccaattcgccgttatccagacttaacacttcatcgaggtatcaaatatttactcgctaaagaacaaggcgcaaaacgtaaaaccaccgatacaggcggttatcattactcttttgatgaaatggatttacttggcaatcactgttcaatgaccgaacgccgtgccgacgacgccactcgtgaagtggctgattggctgaaatgtgaatatatgcaagatcatgtcggtggcgaatttagcggtgttatttcatctgtgacgggatttggtttatttgtacgcttagatgatttattcatcgatggtttagtccatatttccaccttagaaaacgattattaccaattcgatgcagcaaaacagcgtttaatcggcgaaaatagcggaatgcaatatcgcttaggcgataaagttcgcatcaaagttgaagcggtacatttagaaaataaaatggtcgatttctcgctaatggggagtgaacgtaaatctcgtcgagctggaaaaacggcgaaagaaaaagctaagaaagtttttaaagagctaccgtctaaagcctccaaaaaacgaaaaagtgcggtaaaaaagaaagaagtttcgaagaaaacatctagaaaacgaaaataa

SEQ ID NO: 1822 - protein, 782 aa, Haemophilus influenzae
MTKKRKNLINQDPHYKRELEKYGNPIPSREFILSVIRDNNAPMNRDEILTALSIRNEDQVEAMRRRLRAMENDGQLVFTKRKRYALPEKLDLFKGTVIGHREGFGFLQVDGKKDDLFIPNHQMQRVMHGDFVLAQPAGLDRRGRREVRIVRVLESRKKQIVGRFFLENGFSYVVPDDSRIGRDILVPNEHRNGARMGQVVVVELQKRSASFNQPIGVITEILGDNMAKGMEVEIALRNHDIPHKFPSAVEKYVKKFTEEVPEEAKKGRVDLRNLPLVTIDGEDARDFDDAVYCEKHGKGWKLWVAIADVSYYVRLRSALDVEAHNRGNSVYFPNRVVPMLPEILSNGLCSLNPQVDRLCMVCEMQMSAKGKLTDYRFYEAVMNSHARLTYTKVAKMLEGDEELRARYSTLVPHLEELYKLYQALLGARHQRGAIDFETIETKFIFNAMGRIERIEPVVRNDAHKIIEECMILANIAAANFMEKHKEPALYRIHATPIEEKLTSFRTFLSEFGLTLEGGLKPTTKDYAALLEKIKERPDHELIQTMLLRSLSQAVYHADNIGHFGLALEEYAHFTSPIRRYPDLTLHRGIKYLLAKEQGAKRKTTDTGGYHYSFDEMDLLGNHCSMTERRADDATREVADWLKCEYMQDHVGGEFSGVISSVTGFGLFVRLDDLFIDGLVHISTLENDYYQFDAAKQRLIGENSGMQYRLGDKVRIKVEAVHLENKMVDFSLMGSERKSRRAGKTAKEKAKKVFKELPSKASKKRKSAVKKKEVSKKTSRKRK

SEQ ID NO: 1823 - DNA, 708 bp, Haemophilus influenzae
atgaaattaacctctccgatctttaatgatcaacaaaaacgtcgtgcaatcatctggctcagctttttccacatattcatcattgcagcgagcaattactttgtacaaatcccttttgaaatcacgctaaaattaaccgcacttggtgcagcaaatgatttttctttccacagcacttggggaacgctcacattcccatttatctttttagctaccgatttaaccgtacgaattttcggtgcggaagatgcgagaaaaatcatcttcgtggtgatgtttcctgcacttattgtaagttacgtcatatctgttttattctctgaaagcaaattccaaggtttcgaatcattaacgcattttgatctgtttgtattccgtattgctattgcgagctttgccgcttacgtggtaggacaattgcttgatgtgatcgtatttaaccgcttacgtcagttaaaaacatggtgggtggcgccaactagctcaatgacattcggttcaatggcggatacgtttgttttcttcagtatcgccttctaccaaagtgcagatccgttcatggctgaacactgggcacaactcggctttgtagattatctatttaaattatttataggaattatcttgttcgtcccagcctatggcgtagtattaaatgttattttacgaaaactacaaatgctcgtaacagaacgcattcctgcataa

SEQ ID NO: 1824 - protein, 235 aa, Haemophilus influenzae
MKLTSPIFNDQQKRRAIIWLSFFHIFIIAASNYFVQIPFEITLKLTALGAANDFSFHSTWGTLTFPFIFLATDLTVRIFGAEDARKIIFVVMFPALIVSYVISVLFSESKFQGFESLTHFDLFVFRIAIASFAAYVVGQLLDVIVFNRLRQLKTWWVAPTSSMTFGSMADTFVFFSIAFYQSADPFMAEHWAQLGFVDYLFKLFIGIILFVPAYGVVLNVILRKLQMLVTERIPA

SEQ ID NO: 1825 - DNA, 633 bp, Haemophilus influenzae
atggagttacacaatattcgtgatgaatatactaaacgagtgctttcacaacatgattgccatgaaaatccaatctcgcaatttgaacagtggcagaaagaggctattcacgctcaagttaatgaacctaccgcaatgaatattgcgactgttgatgaacaaggtcgcccaaatagccgaatggttttgttaaaagaagtcaatgaacaaggttttgtcttttttacgaattatcttagtcgaaaaggcggctgtattgagcgtaatccttatgtcgcgctgactttcttttggcctgaattggaacgccaagtgcggattgaaggtaaggcggttaaaattccagcagaacaatccgataaatattttgctacccgaccttacaccagtcgtataggggcttgggcaagtgagcaaagtgcggtgatttctaattataaatctttgctagcaaaagccgcattggttgccgctaaacatccattaaacgtgcctcgaccagattattggggcggctatttagtggtgccagaaaccgtggaattttggcaggggcgtccaagccgtttacatgatcgcattcgttatcgtaaagaaagtgataattggattagagaaagactttctccttag

SEQ ID NO: 1826 - protein, 210 aa, Haemophilus influenzae
MELHNIRDEYTKRVLSQHDCHENPISQFEQWQKEAIHAQVNEPTAMNIATVDEQGRPNSRMVLLKEVNEQGFVFFTNYLSRKGGCIERNPYVALTFFWPELERQVRIEGKAVKIPAEQSDKYFATRPYTSRIGAWASEQSAVISNYKSLLAKAALVAAKHPLNVPRPDYWGGYLVVPETVEFWQGRPSRLHDRIRYRKESDNWIRERLSP

SEQ ID NO: 1827 - DNA, 1851 bp, Haemophilus influenzae
atgaaaaacgaaattgatattaaaaaactccgtaacatcgcaattattgcgcacgttgaccatggtaaaaccacccttgtagataaacttcttcaacaatctggtacttttgaatctgcacgtggtgatgtagatgaacgcgttatggactcaaacgatcttgaaaaagaacgtggcattacaattcttgcaaaaaataccgcgattaactggaatgactaccgcatcaacattgtagatactccaggacacgcagacttcggtggcgaagttgaacgtgtactttctatggtggattctgttctattagttgttgatgcgtttgatggcccaatgccacaaacgcgtttcgtgacacaaaaagcattcgctcatggtttaaaacctattgtcgtaattaataaagttgatcgccctggtgcgcgtccagactgggttgtggatcaagtatttgacttatttgtcaatcttggtgcaagcgatgaacaattagacttcccaattatctatgcttcagcactaaatggtgttgcaggtcttgaacacgaagatttagcggaagatatgacgccattatttgaagccattgtaaaatatgtagaatcgcccaaagtagaacttgatgcaccattccaaatgcaaatttcacaattagactacaacaactatgtaggtgttatcggcattggtcgtattaagcgtggttcgattaaaccaaaccaaccagttactatcatcaatagtgaaggaaaaactcgtcaaggtcgtatcggtcaagtacttggacatcttggtttacaacgttatgaagaagacgttgcttatgctggcgatattgttgctatcactggtttaggagaattaaatatttctgatacgatttgtgatatcaacgcagttgaagcactgccatcattaacggttgatgaaccaaccgtaaccatgttcttctgtgtaaacacctctccatttgcagggcaagaaggaaaatacgtcacatctcgtcaaattcttgaacgtttaaataaagaattggttcacaacgtggcgttacgagtagaagaaaccccaaacccagatgaattccgtgtatctggtcgtggcgaattacatctttccgtgttaatcgaaaatatgcgtcgtgaaggttatgagcttgcggtttctcgtccaaaagtaatttatcgtgatattgacggtaaaaaacaagaaccatacgaacaagtaactatcgatgtggaagaacaacatcaaggttctgtgatggaagcattaggtatccgtaaaggtgaagttcgtgatatgttgcctgacggtaaaggtcgtgtgcgtttggaatacattatccctagtcgtggattgattggcttccgtggcgactttatgaccatgacttctggtacaggcttactttactcaagttttagccactatgatgaaatcaaaggcggcgaaattggtcagcgcaaaaatggtgtgttgatttctaatgcaacaggtaaagcactgggttatgcattatttggcttacaagaacgtggtaagttaatgattgatgcaaacgtagaagtttatgaagggcaaattatcggtattcatagccgctcaaatgacttaaccgtaaactgcttacaaggtaaaaaactaactaatatgcgtgcgtcaggtaaagacgatgcgattgtgctaactacacctgtaaaattcagtcttgaacaagcgattgaatttatcgatgatgatgaactagtggaagtaacacctgagtcgattcgtatccgtaaaaaacttttaacggaaaacgatcgtaaacgtgcaaatcgtacaacaacaagtactagcacgcattaa

SEQ ID NO: 1828 - protein, 616 aa, Haemophilus influenzae
MKNEIDIKKLRNIAIIAHVDHGKTTLVDKLLQQSGTFESARGDVDERVMDSNDLEKERGITILAKNTAINWNDYRINIVDTPGHADFGGEVERVLSMVDSVLLVVDAFDGPMPQTRFVTQKAFAHGLKPIVVINKVDRPGARPDWVVDQVFDLFVNLGASDEQLDFPIIYASALNGVAGLEHEDLAEDMTPLFEAIVKYVESPKVELDAPFQMQISQLDYNNYVGVIGIGRIKRGSIKPNQPVTIINSEGKTRQGRIGQVLGHLGLQRYEEDVAYAGDIVAITGLGELNISDTICDINAVEALPSLTVDEPTVTMFFCVNTSPFAGQEGKYVTSRQILERLNKELVHNVALRVEETPNPDEFRVSGRGELHLSVLIENMRREGYELAVSRPKVIYRDIDGKKQEPYEQVTIDVEEQHQGSVMEALGIRKGEVRDMLPDGKGRVRLEYIIPSRGLIGFRGDFMTMTSGTGLLYSSFSHYDEIKGGEIGQRKNGVLISNATGKALGYALFGLQERGKLMIDANVEVYEGQIIGIHSRSNDLTVNCLQGKKLTNMRASGKDDAIVLTTPVKFSLEQAIEFIDDDELVEVTPESIRIRKKLLTENDRKRANRTTTSTSTH

SEQ ID NO: 1829 - DNA, 1419 bp, Haemophilus influenzae
atgccaaacgcaaatgcaatcgccaatgtatttaagctaattgaagaaaataatgtgaaatttgtacttcttcgatttaccgatattaaaggtaaagaacatggtgtttctatcccagttagccttgttgatgaagatatgtttgaagacggcaagatgtttgatggctcctctgttgaaggttggaaaaccattaataaagccgatatgttgcttatgccaatagctgaaacggcggttgtcgatccattcgcgcaaatcccaacgctttctattcgttgtagtgtttatgaaccaacgacaatgcaaagctatgatcgcgatccgcgctctattgcaattcgtgcagaaaattatatgcgttcaacaggtattgctgatcaagctttttttggtccagagcctgaattcttcttatttgatgatgtgcgttttaatgtatcaatgaacaaagcatctttttctattgatgatatagaagctgcttggaacacgaataaaaaatatgaagaaggcaataatgcttatcgcccattaaaaaaaggcggatattgtgccgttgcaccgattgatagtgcgcacgatattcgttctgaaatgtgcttgattttagaagaaatgggattagtcattgaagcccatcatcatgaagtggcgactgcagggcaaaacgaaattgcgactaaatttaatacgctaactttaaaagcggatgagactcaaatttataaacatgtcgtacaaaacgttgcattagagcacggtaaaacggcgtgttttatgcccaaaccaattactggagataatggttcgggtatgcactgtaatatgtcgttaagtaaagacgggaaaaatattttccaaggcgataaatatgcaggcctttctgaaaccgcactttactacatcggcggtatcattaagcacgctaaagccttaaatgcgttcactaatccaagtactaattcatataaacgtttagtgcctggttatgaagcaccagtattgttggcttattctgcaagcaatcgttctgcctcgattcgtatccctgccgtaacaaatccgaaagcgattcgcgtagaagcacgtttcccagatccattggcaaacccatatttagcatttgctgcattattaatggcaggtcttgatggcgtggtaaacaaaatccacccaggcgatgcgatggataaaaatctttacgatcttccaccagaagaattaaaagatattccagcggttgcaagctctttagaagaagcattgaattcattagaaaaagactatgaatttttaactcaaggtggcgtatttgctaaagattttattgatgcgtttatcagtatcaaacgtaaagaagtagaacgtttaaatatggcaccacatccagttgaatttgaaatgtattatgcgtaa

SEQ ID NO: 1830 - protein, 472 aa, Haemophilus influenzae
MPNANAIANVFKLIEENNVKFVLLRFTDIKGKEHGVSIPVSLVDEDMFEDGKMFDGSSVEGWKTINKADMLLMPIAETAVVDPFAQIPTLSIRCSVYEPTTMQSYDRDPRSIAIRAENYMRSTGIADQAFFGPEPEFFLFDDVRFNVSMNKASFSIDDIEAAWNTNKKYEEGNNAYRPLKKGGYCAVAPIDSAHDIRSEMCLILEEMGLVIEAHHHEVATAGQNEIATKFNTLTLKADETQIYKHVVQNVALEHGKTACFMPKPITGDNGSGMHCNMSLSKDGKNIFQGDKYAGLSETALYYIGGIIKHAKALNAFTNPSTNSYKRLVPGYEAPVLLAYSASNRSASIRIPAVTNPKAIRVEARFPDPLANPYLAFAALLMAGLDGVVNKIHPGDAMDKNLYDLPPEELKDIPAVASSLEEALNSLEKDYEFLTQGGVFAKDFIDAFISIKRKEVERLNMAPHPVEFEMYYA

SEQ ID NO: 1831 - DNA, 624 bp, Haemophilus influenzae
ttggataaaatagctttaaaaattaccttttcagcagaaactccaaaatatgcacaatctgtattgacagagtatgtaaattttgtaaatcaatatagtcttaaccaaacaaaccaagagtttaaacagagatttaacctccgtttagatgagctgagatttagtaaagaacaaattgaagagaatctaacagaagcaaaaaaggttcaagttgaaaacttaacaaatgcgttagatattgctaaaaaagcgggtattaaagatttttcaagaggaaataatatctctgattctaaattagcagatggtacatatttatttatactcgctgaaaaatatttacaggcgcaactagatattgctaaaaacacacctgttgtttacccagctaattattatattacagatagacagttatttaaattaaataaattagcttcacaattggaattagttgaggatgtaaaaacgtattattatttaagctctcctgattatcctgtggttaaagataatcctaagagggcgttgattcttgctatcgggtttattatcggtattctgttacccactttctttattttattaggttcggttatacaaactaataaaaagcagtcatga

SEQ ID NO: 1832 - protein, 207 aa, Haemophilus influenzae
MDKIALKITFSAETPKYAQSVLTEYVNFVNQYSLNQTNQEFKQRFNLRLDELRFSKEQIEENLTEAKKVQVENLTNALDIAKKAGIKDFSRGNNISDSKLADGTYLFILAEKYLQAQLDIAKNTPVVYPANYYITDRQLFKLNKLASQLELVEDVKTYYYLSSPDYPVVKDNPKRALILAIGFIIGILLPTFFILLGSVIQTNKKQS

SEQ ID NO: 1833 - DNA, 579 bp, Haemophilus influenzae
atgatgctttccgaaaatgtttgcctgcaatggataatccatatttttcatcgctttagcgaagcggaattaggtttatatgcaatgggagcgcaaattgcatttatcttatcagtttttattttagcgataaataaagcgcttgttccctatctgtttgagaaattaaaacaaggtagtgttaagttaaaagatttacatagatggtcgttactttcattattgattgtgcctattccatcacttgttaccttaattgttccggaacaatggctattgttcttcttaggcaaacattttatcggggtaaaatactacattatagtattcttactctctacgagtttaaccatcccttatttgttcttagtaaattatttgttttatcacggaaaaactaaagaaatttcgttttgctctgtattatcaacaatgatttacttgggagcattggggggattaatttttacggatgtggtttatattccttatgctagtgtattgggggcattggggattttacctgtattatataaaataacaaaaagagtagaagaaaatgaatatgccactcattag

SEQ ID NO: 1834 - protein, 192 aa, Haemophilus influenzae
MMLSENVCLQWIIHIFHRFSEAELGLYAMGAQIAFILSVFILAINKALVPYLFEKLKQGSVKLKDLHRWSLLSLLIVPIPSLVTLIVPEQWLLFFLGKHFIGVKYYIIVFLLSTSLTIPYLFLVNYLFYHGKTKEISFCSVLSTMIYLGALGGLIFTDVVYIPYASVLGALGILPVLYKITKRVEENEYATH

SEQ ID NO: 1835 - DNA, 753 bp, Haemophilus influenzae
atgaatatgccactcattagtataataatgcctgtttataatgcagaatgttaccttaatcaaggtattttatcttgcttaaatcaatcttatcaaaacattgaattaattttaattgatgatggttcaacagataaaagtattgaaataataaataacatcattgataaagataagcgggttaaacttttctttaccccaactaatcaagggcctgcagcggcaagaaatatagggttagaaaaagcacaaggtgactatattacattcttagatagtgatgattttattgcaaatgataaattagaaaaacaacttaattttatgttgcaaaatcatcttgtaatgacgcatggcaactatgctttctgtgatttggaaggaaatcagataaaattagttacgactagtaaaaaaattgattatttaaccttattacaaggtaaccaatttaaaataatgaccgtacttgttgaaagagaatctattaaattacttaggtttcctaatattaaacacgaagattacgccttctttttggattgtttaaaagaagttaaacaatctatactatatagccatcaggcaagttcatttgtaagaatcggtaaagtcagcgtttcatcaaataaatttaaaagtgcaatctggacatttaatatctattttaaaagagagaaactaggtgtagtaaaatcaatttattattttatcctctatgcctataatggatttattaaatacaagaaataa

SEQ ID NO: 1836 - protein, 250 aa, Haemophilus influenzae
MNMPLISIIMPVYNAECYLNQGILSCLNQSYQNIELILIDDGSTDKSIEIINNIIDKDKRVKLFFTPTNQGPAAARNIGLEKAQGDYITFLDSDDFIANDKLEKQLNFMLQNHLVMTHGNYAFCDLEGNQIKLVTTSKKIDYLTLLQGNQFKIMTVLVERESIKLLRFPNIKHEDYAFFLDCLKEVKQSILYSHQASSFVRIGKVSVSSNKFKSAIWTFNIYFKREKLGVVKSIYYFILYAYNGFIKYKK

SEQ ID NO: 1837 - DNA, 885 bp, Haemophilus influenzae
atgatttcattacttattattagcttcgggcgttatcaagaagtattggaaacgtttgcatgtgtcaataaatatcatggtaaaaaaattgaattacttttccttgataataatccagcaagagagttggaaatagctctatcttctattgtagaaaataatagtagcattttatttagctattttcataccggtgagaatctaggtgttgctgaaggacgtaattttttaattgaaaaagctcaaggagatattttaattacacttgatgacgatattgaaattgaagatattattcttttaattcagaaagtgactaattatatggcaaataatgctaaagtaggagcgttagcctttaatattaaaaactattttactcgtaaagcattatcacacgagatcccacatggtaataaaaagttagatttttcacagaatttactgacttattattttattggtgctgggcatgcaataaggaaagaagtctatcaaaaagcggggttttaccctaaggatcttggtctatatggtggtgaagaaagagatttgtcatttaggattttagaagcaggctatcagatactttatgcaagtgatattgtgatttatcataaggtttcaccaaatggaagaatgatgagaaaaaaggaaaacttctttagatatagaaatcaacttattgttttaaatagatatatgccaatgagatatcgattaacttctaattttgtttggtctattttttatcttgtaaaaatgaacggagaaattctagatattgtaaaagtattatcagaaatttttagtttaaaaagaaaggtagtatcagataaaacaattagatatattaaatttgttgatggtaggttatattattaa

SEQ ID NO: 1838 - protein, 294 aa, Haemophilus influenzae
MISLLIISFGRYQEVLETFACVNKYHGKKIELLFLDNNPARELEIALSSIVENNSSILFSYFHTGENLGVAEGRNFLIEKAQGDILITLDDDIEIEDIILLIQKVTNYMANNAKVGALAFNIKNYFTRKALSHEIPHGNKKLDFSQNLLTYYFIGAGHAIRKEVYQKAGFYPKDLGLYGGEERDLSFRILEAGYQILYASDIVIYHKVSPNGRMMRKKENFFRYRNQLIVLNRYMPMRYRLTSNFVWSIFYLVKMNGEILDIVKVLSEIFSLKRKVVSDKTIRYIKFVDGRLYY

SEQ ID NO: 1839 - DNA, 834 bp, Haemophilus influenzae
gtgttaccaataaataagatatcaatttcttattttaaggataatgttcatgatattgagtatggttatttgttttttgaatcagtaattaaatactttagtgatgaacaccttgtttttcttgttttttatgtctttgcaatgttcctttttctatataaggcaataaacaatactggtttatatagaaatatacagttgcttattttctattcttttatatttttagaatatatttttagtgtgcacagacaaggtgtggcaatgtgcataatatattatgctatcatactgatgatccatgaggataaattatttaggtatactttgttggttattttagcctcgctatttcataagatagccattatacttattccgctttatttttttataagaaaagaatttaaagtatctgttctattttacatggttgtaattgcattatttatatcttcttttgacttaataggtatagttattaagtggtgtaatgagaatttctctaatgtggctgtttttagacgggtgtttcactattattttaataagcatgatgcaaatttaaaaatgtctgctataccttacatgcaacgagcaataatgttatttatactattcctattttataaaagaatcccctatacttattctaacttactgctcttatatgttagtcttttctttatattctctaatgtgggagtgttagcaaatagggtttcaggaattttattggtatcttatgcaatatttttctctgttctaatttgtaacttaaaatttaagagaaatagattacttattattttatatatgttttttctaacttag

SEQ ID NO: 1840 - protein, 277 aa, Haemophilus influenzae
MLPINKISISYFKDNVHDIEYGYLFFESVIKYFSDEHLVFLVFYVFAMFLFLYKAINNTGLYRNIQLLIFYSFIFLEYIFSVHRQGVAMCIIYYAIILMIHEDKLFRYTLLVILASLFHKIAIILIPLYFFIRKEFKVSVLFYMVVIALFISSFDLIGIVIKWCNENFSNVAVFRRVFHYYFNKHDANLKMSAIPYMQRAIMLFILFLFYKRIPYTYSNLLLLYVSLFFIFSNVGVLANRVSGILLVSYAIFFSVLICNLKFKRNRLLIILYMFFLT

SEQ ID NO: 1841 - DNA, 915 bp, Haemophilus influenzae
atgaataaaagagtaataattatcagtagtatgaggatgttatttttatttcttcttatagataaaaggagattaggggatgtttttatattttctaataaagttgaatctaaaattaaatctgcatttgagtttcatagtgcttattctatctttgatttactatttaaaaaaattatttctgaaattaaattaatatatttttgttataaaaatagaatagaatttaaaaaaactgttgtttatggtgctgaccatattttaggctcttcattttttttaagtaaatgtcttttttatttaattgaagatggcactgagaactatcaaactaaaaattataaaagaagtttaaaaaatagattgttttcactacctaaatttggaatgcataaaaatgttaagaaaatttatttaacaaggaatgataatattcctgattgtattaaagaaaaagttgaagtaattaatattcatcaactttggaaaaataaaacaaaagaagagcaagatgagattttatttttactaagtgtagataaaaataaattagaaaatttaaagcataaaagtatcgttttatttacacagccactttcagaagataatgttttaactgaggaagagaaaatcgctctttataaaactatcataggaaattatgatcaagagaaacttgtaattaaaacacatccaagagaaactacaaactatcgaaattatttccctaatattgaggtttttagtgaaaattacccatctgagattttagatgtattaggcataagatttgaaaaagtggtaacaattttctcaacggctgtatatgtatacccaaaagaaaatattattttttatggtacaaaaatacaccataaattattatcaaaatttggaagaatagaatatgaataa

SEQ ID NO: 1842 - protein, 304 aa, Haemophilus influenzae
MNKRVIIISSMRMLFLFLLIDKRRLGDVFIFSNKVESKIKSAFEFHSAYSIFDLLFKKIISEIKLIYFCYKNRIEFKKTVVYGADHILGSSFFLSKCLFYLIEDGTENYQTKNYKRSLKNRLFSLPKFGMHKNVKKIYLTRNDNIPDCIKEKVEVINIHQLWKNKTKEEQDEILFLLSVDKNKLENLKHKSIVLFTQPLSEDNVLTEEEKIALYKTIIGNYDQEKLVIKTHPRETTNYRNYFPNIEVFSENYPSEILDVLGIRFEKVVTIFSTAVYVYPKENIIFYGTKIHHKLLSKFGRIEYE

SEQ ID NO: 1843 - DNA, 1416 bp, Haemophilus influenzae
atgaataagttatttttgtctaaatttattttagctttattagattttattacatttaatgcttctttttcattatctttactaataatatcctattatcatcatggatatgatcaatatttacctatttacgaaatagatgatagatattacattcatacgcttttaggttttctttgtgttggatggtttgctattaggctaagacattatacttatagaaaacctttttggtttgagttaaaagagatttttagaacacttcttatctttgcggtttttgaacttgcaattgttgcattttctaaattgtatttctctcgctatttatgggtgcttatatgggggattacctttctactttttccattggcgagggttttagtaaagaaatttcttataaaatcaggttggtttcttagagatacaattgtgattggttctggggataatgcttttgatgtttataatgcattaagagatgaaccttatttagggtttcatgttacgtattttatttcagtttctaatattagtaataatgtaaaggaattaaatattcctatgttaaataatatgtcctcttggacatcagtaactaaaaaaacagatcaatttattattgcattggaagatgatgaagaggtagatagaaataattggttacgttatttttccacaaatggatatcgttctgtttctgttattcctacattgagaggcttacctttatatagtacggacatgtcttttatgtttagccacgaaatgatgttattacgaatgaataataatttggctaaactatcttctcgtattttgaaacgaaccatggatattgttggttccttagctattattattatattttcccctgtgttgctttatctgtattttgcagtaaaaaaagatggtggtaatgctatttatggacatcctcgaattggtcgtaatgggaagacatttaactgcttaaagtttagatccttgattgtaaattccaaagaggtgcttgatgaattgctaagaacagatcctcaagcaagagcagaatgggaaaaagattttaaattaaagaatgatcctcgaattactaaaatcggtgcttttattcgcaaaacaagtttagatgaattacctcaattatttaatgttttaaaaggtgaaatgagtttagttgggcctcgcccaattgtaattgatgagctagagcgttatgaagaaaacgtagattattacttaatggcaaagcccggtatgacagggctttggcaagtcagcggacgtaataatgtcgattataatactcgcgtttattttgattcttggtatgtaaaaaattggtcactttggaatgatattgctattttgttcaaaactgtaaatgtagttttaaaacgagatggagcttattaa

SEQ ID NO: 1844 - protein, 471 aa, Haemophilus influenzae
MNKLFLSKFILALLDFITFNASFSLSLLIISYYHHGYDQYLPIYEIDDRYYIHTLLGFLCVGWFAIRLRHYTYRKPFWFELKEIFRTLLIFAVFELAIVAFSKLYFSRYLWVLIWGITFLLFPLARVLVKKFLIKSGWFLRDTIVIGSGDNAFDVYNALRDEPYLGFHVTYFISVSNISNNVKELNIPMLNNMSSWTSVTKKTDQFIIALEDDEEVDRNNWLRYFSTNGYRSVSVIPTLRGLPLYSTDMSFMFSHEMMLLRMNNNLAKLSSRILKRTMDIVGSLAIIIIFSPVLLYLYFAVKKDGGNAIYGHPRIGRNGKTFNCLKFRSLIVNSKEVLDELLRTDPQARAEWEKDFKLKNDPRITKIGAFIRKTSLDELPQLFNVLKGEMSLVGPRPIVIDELERYEENVDYYLMAKPGMTGLWQVSGRNNVDYNTRVYFDSWYVKNWSLWNDIAILFKTVNVVLKRDGAY

SEQ ID NO: 1845 - DNA, 1005 bp, Haemophilus influenzae
atgaatattttaatcaccggcggttccggcttcatcggttccgctcttattcgatatatcatttatcagactcaagattccgttatcaatattgataaactgacctatgcggcaaatcaatcagctttgaaagaggttgaaaataatcctcgctatgcttttgagcaaattgatatctgtgatcttaaggcgatagaaagcgttttcgagaaatatcagcctgatgcagtgatgcatttggcggcagaaagtcatgtcgatcgttctatttctggagcagctgattttattcaaaccaatattgttggtacttatacgttgttagaggttgctaagaattattggcataccttagacgaagctaaaaaaacgacctttcgattccaccatatttctactgatgaagtttatggtgatttatctctttcagaacctgcttttaccgaatattctccttatcatccaagcagcccttattcagcatcaaaagcagcgagtgatcatttagtttatgcttggcatcgcacttatggcttgccggtgattattacaaacagttccaataactatggagcttaccaacatccggaaaaactcatccctttagtgatttcaaatgcactgatggggaagcctctgccaatttatggtgatgggcagcagattcgcgattggttatttgtggaagagcatgttcaagccttatatttagttttaacaaaaggtcgagtcggggaaaactataatatcggtggaaattgtgaaaaaacaaaccttgaagtggttaaaacaatttgtcaattactcgaagaacttgcaccaaataagcctaataatattaagtattacgatgatttaattatttttgtaaaagaccgacctggtcacgatgtgcgatattcattggattgttccaaaattcatgcagaattaggttggcaaccgaaaataacctttgaacgaggacttagccagacggtacaatggtatttgtttaacagttaa

SEQ ID NO: 1846 - protein, 334 aa, Haemophilus influenzae
MNILITGGSGFIGSALIRYIIYQTQDSVINIDKLTYAANQSALKEVENNPRYAFEQIDICDLKAIESVFEKYQPDAVMHLAAESHVDRSISGAADFIQTNIVGTYTLLEVAKNYWHTLDEAKKTTFRFHHISTDEVYGDLSLSEPAFTEYSPYHPSSPYSASKAASDHLVYAWHRTYGLPVIITNSSNNYGAYQHPEKLIPLVISNALMGKPLPIYGDGQQIRDWLFVEEHVQALYLVLTKGRVGENYNIGGNCEKTNLEVVKTICQLLEELAPNKPNNIKYYDDLIIFVKDRPGHDVRYSLDCSKIHAELGWQPKITFERGLSQTVQWYLFNS

SEQ ID NO: 1847 - DNA, 1227 bp, Haemophilus influenzae
atgattcaagaaaaacatctaacgtttacaattaacctcttagtttctctatttttcttaaccgttttaatcgttccaaagggctataactatgcaccaataatattaagcgcgattggattgatttatttcataccattaaagaaaaaactatcttttagctctgaagataaaaaactgattttttcttttttattttatttctccacattcttattatctatcattatcaataaagatgggattagagaaatagataatccaagccgacttctattattcattcctctactacttttattcaaaaactttccaataaaaaggaaaacaattttatacgcaattccttctagtgcattaattactggatgcgttgcgttatttcagaagtttgtattagggtatgaaaaaccatttcctgaaacaatgcacatacaaatgggcaacattgcgatctctttagccacattcgcccttgttatcactcttcacttcttcatcaaaaaacaatataagtctacattatttgggtttgtagccagtatacttgctatcattactagtgcattatctggggctagaggtggatggattggcttacccgttgtaattggtataattttatttctatacaaagaagacattaataagaaacttattataactttagttacagttattaccattggattaaccgcactcattgccaatcctaaattcggaattgaaaaacgatataacgcagcaaaatcagatattgttagctatttagaaaaaaacaatagaaacacctcattaggtgccagatttgacatgtgggaaaatgccttaattgctataaaggaagcgcctatctttggccatgggagtaatggatacgaggagtttagacataaacaagtaaaatctaaacaaatggctaaaaccactttaaattttggaagtttacataatcaatatttagaatcttgggtgaaacgtggtttagttggatttatagcattaatcctgattattctagctccaatatttttctttattaaaaatttaaacacccataatttagaaacaaaatgtatttgtattttaggaattatacatattgtttcccatatattttatttcacaagccagtcattcttggctcataactcaggcaatattttttacttcttcaactatcttatattttattgtctaataaaaagagaaaaaatcacaagatag

SEQ ID NO: 1848 - protein, 408 aa, Haemophilus influenzae
MIQEKHLTFTINLLVSLFFLTVLIVPKGYNYAPIILSAIGLIYFIPLKKKLSFSSEDKKLIFSFLFYFSTFLLSIIINKDGIREIDNPSRLLLFIPLLLLFKNFPIKRKTILYAIPSSALITGCVALFQKFVLGYEKPFPETMHIQMGNIAISLATFALVITLHFFIKKQYKSTLFGFVASILAIITSALSGARGGWIGLPVVIGIILFLYKEDINKKLIITLVTVITIGLTALIANPKFGIEKRYNAAKSDIVSYLEKNNRNTSLGARFDMWENALIAIKEAPIFGHGSNGYEEFRHKQVKSKQMAKTTLNFGSLHNQYLESWVKRGLVGFIALILIILAPIFFFIKNLNTHNLETKCICILGIIHIVSHIFYFTSQSFLAHNSGNIFYFFNYLIFYCLIKREKITR

SEQ ID NO: 1849 - DNA, 1305 bp, Haemophilus influenzae
atgcaaattacactttcaaataacttagcgaatgatgcttggggaaaaaatgctattttgagctttgactctaataaagcaacaattcatttaaaaaataatgaaaaaactgaccgcactttagttcaacaagctgctcgtaaattgcgtgggcaggggattaaaaatgtggaattagtcggtgaagaatgggatttggaattttgctgggcgttttatcaaggtttttataccgcaaaacaagattacgggattgagtttccgcatttagatgatgaaccgcaagatgaattattagcgcgtattgaatgtggcgattttgtacgtgggattattaatgagccagcacaaagcctaacaccagtaaaattagcagaacgtgcggctgaatttatcttaaaccaagctgatatttataatgaaaaaagtgcggtaagttttaagattatttctggagaagatcttgagcaacaaggttatcacggaatttggactgtgggtaaaggctctgctaatttgccagctatgttgcaacttgatttcaatccaacacaagatccgaatgcgccagtgttagcttgtttagttggtaaggggattacttttgacagtggcggctacagtatcaaaccaagtgatggaatgagcacaatgcgaaccgatatgggcggtgctgcattattaacgggggcattaggtttcgcaatcgctcgtggattaaatcaacgcgttaaactgtatttatgttgcgcagagaatttgataagcaataatgcctttaaactaggcgatattattacttataaaaatggcgtgacagcagaagtgttgaatactgatgcggaagggcgtttggtgttggctgatggattgattgaagcggacagccaaaatccaaattttattattgattgtgcaactttaactggcgcagcaaaaatggctgtaggaaatgactatcattcggtattatctatggatgatgatctcgtgaagaatcttttccaatcagcacaagaagaaaatgaacctttctggcgtttaccatttgaagattttcatcgctcacaaattaattcatcttttgccgatattgctaatattggttctgttccagttggggcaggggcaagtacagcaacggcatttttatcgtattttgtaaaaaattatcaacaaaattggttgcatattgattgttccgctacttatcgtaaatctagtagtgatttatgggctgttggggcgacagggattggtgtgcaaactttagcaaatttaatgttatcaaaatcattgaagtaa

SEQ ID NO: 1850 - protein, 434 aa, Haemophilus influenzae
MQITLSNNLANDAWGKNAILSFDSNKATIHLKNNEKTDRTLVQQAARKLRGQGIKNVELVGEEWDLEFCWAFYQGFYTAKQDYGIEFPHLDDEPQDELLARIECGDFVRGIINEPAQSLTPVKLAERAAEFILNQADIYNEKSAVSFKIISGEDLEQQGYHGIWTVGKGSANLPAMLQLDFNPTQDPNAPVLACLVGKGITFDSGGYSIKPSDGMSTMRTDMGGAALLTGALGFAIARGLNQRVKLYLCCAENLISNNAFKLGDIITYKNGVTAEVLNTDAEGRLVLADGLIEADSQNPNFIIDCATLTGAAKMAVGNDYHSVLSMDDDLVKNLFQSAQEENEPFWRLPFEDFHRSQINSSFADIANIGSVPVGAGASTATAFLSYFVKNYQQNWLHIDCSATYRKSSSDLWAVGATGIGVQTLANLMLSKSLK

SEQ ID NO: 1851 - DNA, 423 bp, Haemophilus influenzae
atgacagaaagaactttttcgattattaaacctgatgcggtaaagcgtaatctaattggagcaatcttaactcgttttgagcaaaatggctttaaaatcatagcctctaaaatggtacgcttaactcgtgagcaggctgaaggcttttatgccgagcatcaaggcaaagaattttttgcgcctttagttgaatatatgatgtcttcgccgatagtggtttctgttcttgaaaaagaaaatgcagtgaaagattaccgcactttgattggtacaacgaatccagaaactgcagaagaagggacaattcgtaaagattttgcattaagtcagcgtgagaattcggttcacggatcagatagtatagaaaatgcaaatcgtgaaattgcttatttctttactgattgtgaaatttttgagcgttaa

SEQ ID NO: 1852 - protein, 140 aa, Haemophilus influenzae
MTERTFSIIKPDAVKRNLIGAILTRFEQNGFKIIASKMVRLTREQAEGFYAEHQGKEFFAPLVEYMMSSPIVVSVLEKENAVKDYRTLIGTTNPETAEEGTIRKDFALSQRENSVHGSDSIENANREIAYFFTDCEIFER

SEQ ID NO: 1853 - DNA, 1212 bp, Haemophilus influenzae
atgaaatttattgatgaatcccttattcgaattgaggctggagatggtggcaacggttgcgtaagtttccgtcgagagaaatttataccgaaaggtggccctgacggtggtgacggtggcgatggtggcgatgtctatttacaggctgatgaaaacctcaataccttaattgactaccgctttaataaacgctttgccgcagagcgtggagagaatggacggagttcagattgtacaggacgtcgcggtaaagatattattttacctgttcccgtaggaactcgcgctattgataatgacaccaaagaaaccttgggagatttaacccaacacggtcaaaaaatgttggtagccaaaggtggttatcacggtttagggaatacccgtttcaaatcatcggtaaaccgtgcaccgcgtcaaaaaacaatgggaacaccgggtgaaaaacgcgatttattattggaattaatgctacttgctgatgtgggaatgctcggttttcctaatgcaggtaaatccacttttattcgtgccgtttcagccgccaaaccaaaagttgcagattatccatttactaccttagtaccaagtctcggtgttgtgaaagtggacgactcacacagtttcgtagtggcagatattcctggattaattgagggggctgcagatggtgcagggctaggaattcgctttttaaaacatttagaacgttgtagagtgcttattcatttagtcgatattgctccaattgatggatctaatccagcagataatgtcgctattattgaatctgaacttttccaatacagtgaaaaattatcagaaaagccacgctggttagtattcaataaaattgatacgatgagcgatgaagaagctgaagagcgggttcgagaaatcactgaacaattaggttgggaagaaggctattacttgatttcagctgcaacagggaaaaatgttccaccactttgtcgtgatattatggactttatcatagcaaatccacgcgaagctgaaacacaacaagttgcacctgaagaagtaaaattcaaatgggaagattatcatcaggaacaactagcggagtatcaatttgatgatgacgaagattgggatgatgattggactgaagaagatgatgacgaagactgggatgatgattggactgaagaagatgatgaaggaattgagttcatctataaaccttaa

SEQ ID NO: 1854 - protein, 403 aa, Haemophilus influenzae
MKFIDESLIRIEAGDGGNGCVSFRREKFIPKGGPDGGDGGDGGDVYLQADENLNTLIDYRFNKRFAAERGENGRSSDCTGRRGKDIILPVPVGTRAIDNDTKETLGDLTQHGQKMLVAKGGYHGLGNTRFKSSVNRAPRQKTMGTPGEKRDLLLELMLLADVGMLGFPNAGKSTFIRAVSAAKPKVADYPFTTLVPSLGVVKVDDSHSFVVADIPGLIEGAADGAGLGIRFLKHLERCRVLIHLVDIAPIDGSNPADNVAIIESELFQYSEKLSEKPRWLVFNKIDTMSDEEAEERVREITEQLGWEEGYYLISAATGKNVPPLCRDIMDFIIANPREAETQQVAPEEVKFKWEDYHQEQLAEYQFDDDEDWDDDWTEEDDDEDWDDDWTEEDDEGIEFIYKP

SEQ ID NO: 1855 - DNA, 921 bp, Haemophilus influenzae
atgaaacaacaacctttactaggctttacctttgcgcttattaccgctatggcttgggggtcattgcctattgccttgaaacaagttttgtctgtaatgaatgcgcaaactatcgtatggtatcgtttcattattgctgcagtttcattattggctttacttgcttataaaaaacaattacctgaattaatgaaagttcgccaatatgcgtggattatgcttattggagtaattggtcttaccagcaattttctattatttagtagctcgctgaattacattgaaccgtcagttgcacaaatttttattcatttatcctcttttggaatgctcatctgtggtgtactgattttcaaagaaaaattagggttgcaccaaaagatcgggcttttcttattattaattggtttaggcttattctttaatgatcgttttgatgcatttgctggactaaatcagtattcaacaggtgtcattttaggtgtagggggtgctcttatttgggtcgcttatggaatggcgcaaaaattaatgttacgtaaatttaattcacaacaaatcttgctaatgatgtatttaggttgtgccatagtctttatgccgatggttgaattttcgcaagtacaagaactcacacctttagctctgatttgttttatttactgctgtttaaataccttaattggatacggctcttatgcggaagcacttaatcgttgggatgtatcaaaagtcagtgttgttatcacacttgtacctcttttcacgatcctattttctcatattgcgcattattttagcccagcagattttgcggcaccggaattgaataatattagctatattggcgcatttgttgtagtatgcggagcaattttatccgcgattggacataaattattaccgcataaaactcattaa

SEQ ID NO: 1856 - protein, 306 aa, Haemophilus influenzae
MKQQPLLGFTFALITAMAWGSLPIALKQVLSVMNAQTIVWYRFIIAAVSLLALLAYKKQLPELMKVRQYAWIMLIGVIGLTSNFLLFSSSLNYIEPSVAQIFIHLSSFGMLICGVLIFKEKLGLHQKIGLFLLLIGLGLFFNDRFDAFAGLNQYSTGVILGVGGALIWVAYGMAQKLMLRKFNSQQILLMMYLGCAIVFMPMVEFSQVQELTPLALICFIYCCLNTLIGYGSYAEALNRWDVSKVSVVITLVPLFTILFSHIAHYFSPADFAAPELNNISYIGAFVVVCGAILSAIGHKLLPHKTH

SEQ ID NO: 1857 - DNA, 258 bp, Haemophilus influenzae
atggcaactaaaaaagctggtggttcaactcgtaacggtcgcgattctgaagctaaacgccttggtgttaaacgtttcggtggcgaatctgtattagcaggtagcattattgttcgccaacgtggtactaaattccacgcaggtaacaacgtaggaatgggaagagatcacaccttattcgcaaccgcagatggtaaagttaaatttgaagtaaaaggcgagaaaagccgtaaatacgtaagtattgttactgaataa

SEQ ID NO: 1858 - protein, 85 aa, Haemophilus influenzae
MATKKAGGSTRNGRDSEAKRLGVKRFGGESVLAGSIIVRQRGTKFHAGNNVGMGRDHTLFATADGKVKFEVKGEKSRKYVSIVTE

SEQ ID NO: 1859 - DNA, 312 bp, Haemophilus influenzae
atgtacgcagttttccaaagtggcggtaaacaacaccgtgtgagcgaaggtcaagttgttcgtttagaaaaacttgaacttgcaactggcgcaacagttgagttcgattctgtgttgatggtcgttaatggtgaagatgttaaaattggtgcaccagtagttgctggtgcaaaagtagtggctgaagtagttgcacaaggtcgtggcgagaaagttaaaatcgttaaattccgtcgtcgcaaacacagccgtaaacaacaaggtcatcgtcagtggttcacagaagtgaaaatcactgggattcaagcataa

SEQ ID NO: 1860 - protein, 103 aa, Haemophilus influenzae
MYAVFQSGGKQHRVSEGQVVRLEKLELATGATVEFDSVLMVVNGEDVKIGAPVVAGAKVVAEVVAQGRGEKVKIVKFRRRKHSRKQQGHRQWFTEVKITGIQA

SEQ ID NO: 1861 - DNA, 990 bp, Haemophilus influenzae
atgaagaaacaagatcttatgagcatagacgagatccagaaacttgcagatcccgatatgcaaaaagttaatcaaaatattcttgctcagcttaattcagatgtaccgctaataggacagttaggtttttatattgttcaaggtggtggtaagcggatccgcccgttgatcgcagttctcgcagcacgatctttagggtttgaaggatctaattcaattacttgtgctacttttgttgaatttattcataccgcttctttgttacacgatgatgtcgtagatgaatctgatatgcgtcgtgggcgtgctacggcgaatgctgaatttggcaatgcggcgagtgtgttggtaggcgattttatttatacgcgtgcatttcaattagttgcacagttagaatcattgaaaattttaagtattatggctgatgcgactaatgttttagcggaaggcgaagttcagcagttaatgaatgttaatgatcctgaaacgagcgaagctaattatatgcgtgtaatttatagcaaaactgcccgtttgtttgaagtggctggtcaggctgcggcaattgtcgccggtggaacagaagctcaagaaaaggctttacaagattatgggcgttatcttggcactgcatttcagctcgtggatgatgtattggattatagtgcaaatgcgcaagctctaggcaaaaatgtaggcgatgatttagctgaaggaaaaccaacccttcctctactacacgctatgcgtcatggaaatgctcaacaggcggctttaattcgagaagcgattgagcaaggtggtaaacgtgaagcaattgatgaagtattagctattatgactgagcataagtctttagattatgcaatgaatcgtgcaaaagaagaggctcaaaaagcagtggatgcaatcgaaattttgccagaaagtgaatataaacaagcgttgatttcattggcatatttgtctgtagatagaaattattag

SEQ ID NO: 1862 - protein, 329 aa, Haemophilus influenzae
MKKQDLMSIDEIQKLADPDMQKVNQNILAQLNSDVPLIGQLGFYIVQGGGKRIRPLIAVLAARSLGFEGSNSITCATFVEFIHTASLLHDDVVDESDMRRGRATANAEFGNAASVLVGDFIYTRAFQLVAQLESLKILSIMADATNVLAEGEVQQLMNVNDPETSEANYMRVIYSKTARLFEVAGQAAAIVAGGTEAQEKALQDYGRYLGTAFQLVDDVLDYSANAQALGKNVGDDLAEGKPTLPLLHAMRHGNAQQAALIREAIEQGGKREAIDEVLAIMTEHKSLDYAMNRAKEEAQKAVDAIEILPESEYKQALISLAYLSVDRNY

SEQ ID NO: 1863 - DNA, 738 bp, Haemophilus influenzae
atgaatacagaacttcaacctaaactagaaaaaagtgcggtcaattttcaagctaaaccgcgaaaacaaaaaatccgtaaggatcctaacgcaccttttattcgtgaaaaacttgagttgccagatggacacaataagctccttttgcattcttgttgtgcgccttgctctggcgaagtgatggaagcaattcttgcatcaggcattgaatttacaatttatttttataatccaaacattcatccactcaaagaatatttgattcgtaaagaagaaaatatccgttttgcaaaaaaatttggtattccatttattgatgctgattacgatcgtcaaaattggtttgatcgtgctaagggtatggaatgggagcctgaaagaggtattcgctgcacaatgtgttttgatatgcgttttgaaaaagctgctgaatatgctcataaacatggtttccctgtatttactagttgcctaggtatttctcgctggaaggatatgaatcaaatcaatggctgtgggcatcgcgctgcggaaaaatatgatgatgttatttattgggattataactggcgaaaagaaggtggctcgcaacgcatgattgaaattagtaagcgtgagcgattctatcaacaagaatattgcggttgtgtgtattctttacgtgatagtaataaatggcgagaagagacgggtcgtcaaaaaattgaaatcggaaaattgtattatagtgctgattaa

SEQ ID NO: 1864 - protein, 245 aa, Haemophilus influenzae
MNTELQPKLEKSAVNFQAKPRKQKIRKDPNAPFIREKLELPDGHNKLLLHSCCAPCSGEVMEAILASGIEFTIYFYNPNIHPLKEYLIRKEENIRFAKKFGIPFIDADYDRQNWFDRAKGMEWEPERGIRCTMCFDMRFEKAAEYAHKHGFPVFTSCLGISRWKDMNQINGCGHRAAEKYDDVIYWDYNWRKEGGSQRMIEISKRERFYQQEYCGCVYSLRDSNKWREETGRQKIEIGKLYYSAD

SEQ ID NO: 1865 - DNA, 1371 bp, Haemophilus influenzae
atgacaattgagtcaattctttcagctattgatagctttatttggggcgcacctctacttatattattatctggtacaggactctatttaacgttacgcttaggctttattcaaattcgctacttaccgcgcgcactaggttatttgttcaaaaaagataaaggtggaaaaggagacgtttcctcttttgctgcactttgtactgcattagcagcaacaattggaactggtaatattgtgggcgttgcaactgctgtacaagcaggtgggcctggtgctattttttggatgtggttagtcgccttgttaggaatggcaacaaaatatgccgaatgtttactcgcggttaaataccgtgttcgcgataaaaatggctttatggctggcggtccaatgtattacattgaacgcggtctaggcatcaaatggctagcaaaattatttgcattatttggtgtgatggtggcctttttcgggatcggcacattcccacaggtcaatgcgattacccatgcaatgcaagatacttttaatattcctgttttagttactgcaattattgtgactcttttagtcggcttaattattcttggcggtgtaaaacgtattgcaaccgcatcatcggtaattgtgccgtttatggcgattttatacgtcacgacttcactggttattatccttttaaatatagaaaaagtaccagatgcgattttattgattattgatagtgcttttgatccacaagctgcattaggcggtgccgtagggcttactgtgatgaaagcgattcaatcaggcgttgcgcgcggcattttctccaatgaatcaggtttaggaagtgcaccaattgcagctgcagcggcacaaactcgtgaacctgtgcgacaaggcttaatttccatgacaggtacattcttagataccatcatcgtttgtacaatgacaggtattgtattggtattaacgggagcgtggaacaatcctgaattagcgggtgctaccgtcacaaactatgcctttgcacaaggtttaggcacatcaattggtgcaacgattgtaacagtcggtttattattttttgcattcacgactattttaggttggtgttactacggggaacgttgctttgtttatctcgtcggtattcgtggcgtaaaactatatcgtctagcttatattatgttggttggtttaggggcattcttacacttaaatttaatatggattatcgccgatattgtaaatggtttgatggctttcccaaatcttatcgcgcttattggattgcgaaaagtgatcattgaagaaacaaaagattattttcaacgtttaaaaattaatcattatgatcaagatgaagtgataaaatag

SEQ ID NO: 1866 - protein, 456 aa, Haemophilus influenzae
MTIESILSAIDSFIWGAPLLILLSGTGLYLTLRLGFIQIRYLPRALGYLFKKDKGGKGDVSSFAALCTALAATIGTGNIVGVATAVQAGGPGAIFWMWLVALLGMATKYAECLLAVKYRVRDKNGFMAGGPMYYIERGLGIKWLAKLFALFGVMVAFFGIGTFPQVNAITHAMQDTFNIPVLVTAIIVTLLVGLIILGGVKRIATASSVIVPFMAILYVTTSLVIILLNIEKVPDAILLIIDSAFDPQAALGGAVGLTVMKAIQSGVARGIFSNESGLGSAPIAAAAAQTREPVRQGLISMTGTFLDTIIVCTMTGIVLVLTGAWNNPELAGATVTNYAFAQGLGTSIGATIVTVGLLFFAFTTILGWCYYGERCFVYLVGIRGVKLYRLAYIMLVGLGAFLHLNLIWIIADIVNGLMAFPNLIALIGLRKVIIEETKDYFQRLKINHYDQDEVIK

SEQ ID NO: 1867 - DNA, 711 bp, Haemophilus influenzae
atggctactccaaaaattctcgttgttgaagatgaaatcgtcactcgaaatacgcttaaagggatttttgaagcggaaggatatgatgtatttgaagcagaaaatggtgttgaaatgcatcatatattgacaaatcataatattaatttggttgtgatggatattaatttaccaggtaaaaacggcttattattggcaagagaactccgtgaagaattaagcttacctcttatttttttaactggtcgagataatgaagtggataaaattttaggtctggaaattggtgccgacgattatttaaccaaaccttttaaccctagagaactgactatccgcgcacgtaatctattgcatcgcacaatgccgcatcaagaaaaagaaaatacatttggtcgagaattctatcgttttaatggttggaaattagacctaaatagccacagtttaattacaccagaaggacaagaattcaaacttcctcgcagtgaattccgtgcaatgttacatttctgtgaaaatccaggaaaattgcaaacgcgcgaagaattgctgaaaaaaatgacaggacgagagttaaaacctcaggatcgtaccgtagatgtcacaattcgacgtatcagaaaacattttgaagatcatccaaatactccaaatatcattatgactatacatggagaaggctatcgtttttgtggagatattgaataa

SEQ ID NO: 1868 - protein, 236 aa, Haemophilus influenzae
MATPKILVVEDEIVTRNTLKGIFEAEGYDVFEAENGVEMHHILTNHNINLVVMDINLPGKNGLLLARELREELSLPLIFLTGRDNEVDKILGLEIGADDYLTKPFNPRELTIRARNLLHRTMPHQEKENTFGREFYRFNGWKLDLNSHSLITPEGQEFKLPRSEFRAMLHFCENPGKLQTREELLKKMTGRELKPQDRTVDVTIRRIRKHFEDHPNTPNIIMTIHGEGYRFCGDIE

SEQ ID NO: 1869 - DNA, 1740 bp, Haemophilus influenzae
atgaaaaaactctttcttttttttacgctgattttcactgcttttgcggctaattcaggtttattcgataaaaaacaaacctttttaaaagtagatgatgcttttgctttttctgctactttatctacagataaaagccagttacaagcccattgggatattgctgatggctattatttgtatcaagataaaattagtgctgagttagtcggtaaatcaaatcctctctctttacatacccaacaggcggcggagttacatcaagatccttattttggcgaagtaaaagtttttactcactcaattgatggcatatttaggggcacatttaataatgctgatgataaggttgaaatcacttatcaaggatgtaccgaaggtttttgctatccgcctgaaactaaagtattaagaattggggatttagccgtttctcaaaagcaaattgtcgaaaaaacagttgaaaaaaataccgcacttttatctgaacaagatcgtttagctgatggtttattccatagtaaatggacaatttttggtttctttttattaggattgggactggcttttacgccttgcgtattgccaatgttaccgttgctttctgctattgttatcggtcagcaacaacgtccaaatatgatgcgagcgtttagtttagcttttctttatgttcaaggcatggctctgacttacactttgttaggtcttgcagtggcagccatcggtttaccgtttcaaatcgccttgcaacatccttatgtgatgatcgggctttctattttatttgttgttcttgccctttcaatgtttggcttatttactattcaattgccaaatagcttacaaaataaattgaatacatggagccaaaaacaaacctcgggtgcttttggcggtgcctttgcaatgggaatgattgctgggctggtggcatcgccttgtacatctgcgccactttctggtgctttactttatgtggcgcaaagtggcgatttattcacaggtgcagcaaccctttatttgctcgcacttggtatgggcgtgccgctaatgttaatcacattgtttggtaataaaattttacccaaatcaggtgagtggatgaacactgtaaaacaaacattcggctttgttatgttggcgttacctgtgtttttactttctcgtattttgcctgaagtatgggaacctcgcttatgggctgggttagcgacagtattttttatttggtttgcgttgcagatgtctaagaacggttttggctatgctattaaaattattagttttgcgttggctatggttactgtacaacccctgcaaaattggatttggcaaactcagactacaacacaaagtgcggtagaaaataagtctgtttctcaggttaaatttaagcaaattaaaaatactgaagaacttgaccgcactttagcggaaaatccgcatttaattgctatgttggatttatacgcagattggtgtgtggcttgtaaagaatttgaaaagctgacgttttcagatccacaagtgcaacagcaatttcaaaatatcttattgttacaagtgaatatgacaaagaatagcccagaaaataaagcattaatggaacgctttaatgtgatgggattgcctacgattttattttttgatcagcaaaataatgaaattaaaggaagtagagtaacgggctttatggatgctgatgctttttctaattggattgaaaagctactttag

SEQ ID NO: 1870 - protein, 579 aa, Haemophilus influenzae
MKKLFLFFTLIFTAFAANSGLFDKKQTFLKVDDAFAFSATLSTDKSQLQAHWDIADGYYLYQDKISAELVGKSNPLSLHTQQAAELHQDPYFGEVKVFTHSIDGIFRGTFNNADDKVEITYQGCTEGFCYPPETKVLRIGDLAVSQKQIVEKTVEKNTALLSEQDRLADGLFHSKWTIFGFFLLGLGLAFTPCVLPMLPLLSAIVIGQQQRPNMMRAFSLAFLYVQGMALTYTLLGLAVAAIGLPFQIALQHPYVMIGLSILFVVLALSMFGLFTIQLPNSLQNKLNTWSQKQTSGAFGGAFAMGMIAGLVASPCTSAPLSGALLYVAQSGDLFTGAATLYLLALGMGVPLMLITLFGNKILPKSGEWMNTVKQTFGFVMLALPVFLLSRILPEVWEPRLWAGLATVFFIWFALQMSKNGFGYAIKIISFALAMVTVQPLQNWIWQTQTTTQSAVENKSVSQVKFKQIKNTEELDRTLAENPHLIAMLDLYADWCVACKEFEKLTFSDPQVQQQFQNILLLQVNMTKNSPENKALMERFNVMGLPTILFFDQQNNEIKGSRVTGFMDADAFSNWIEKLL

SEQ ID NO: 1871 - DNA, 405 bp, Haemophilus influenzae
atgaacaatcttgaaaaatatcgcccgtatttcttggcatttttacgtatcgttgtcgcttatatgtttattttacacggcacggcaaaatatttggaatttccaatttctatgactggaggaaatggtgcagtaggcgatccaatgctactagtagcaggcgtaattgaaattgttggttccattttattaatcttaggtttatttacacgccaagccgcgtttattttgtcaggggaaatggcatatgcctatttctttctgcacgtagcaggaaaaggaaacctatttttcccaattgcaaatggcggcgagcttgcattactttactcacttctctttctatattttgtattttctggcgcaggtgcttgtgctttagataataagttttttaaaaagtag

SEQ ID NO: 1872 - protein, 134 aa, Haemophilus influenzae
MNNLEKYRPYFLAFLRIVVAYMFILHGTAKYLEFPISMTGGNGAVGDPMLLVAGVIEIVGSILLILGLFTRQAAFILSGEMAYAYFFLHVAGKGNLFFPIANGGELALLYSLLFLYFVFSGAGACALDNKFFKK

SEQ ID NO: 1873 - DNA, 1599 bp, Haemophilus influenzae
atggcagatcgtccaattcgtcaggctttactgagtgtgtctgataaaacgggtattgtagagtttgctcaaggtttagttaaacgtggtgtaaaactactttcaacaggtggaacggcaaaacttttagcacaaaatggtttacctgtaatggaagtgtctgattacacaggtttcccagaaatgatggacggtcgagtgaaaaccttacatcccaaagtacatggcgggattcttggtcgtcgtggtacagatgatgccatcatgcagcaacatgccattgaaggcattgatatggtcgttgtgaatttatatccctttgctgccactgtggcaaaatctgattgcactttggctgatgcggtagaaaatatcgatatcggtggaccaaccatggtgcgttctgcggcgaaaaaccataaagatgtggcgatcgtggttaataatcatgatttcaacgcaattctagccgaaatggatcaacatcaaaacagcctaacttttgaaactcgttttgaccttgcgattaaagcatttgaacataccgctcaatatgattctatgattgccaactatttcggtcagctagtaaaaccttatcatattgcaaaggaagaagaggcgaatgcgaagtgcggtcaattcccacggactttaaaccttaacttcgtgcgtaaacaaactatgcgttacggcgaaaacgcccatcaaaatgcggcattttatgttgatttaaatgtgaaagaagcgagcgtggctacagctaatcaactgcaaggtaaagccttgtcttacaataatattgccgacactgatgcagcacttgaatgcgtgaaagaatttgacgagccagcttgcgtaatcgttaaacatgccaatccatgtggtgtggcgttaggtaaagatattttagacgcctataaccgcgcttaccaaaccgatccaacgtctgcttttggcggcattattgcttttaaccgtgaattagacgaaaaaacggcgaatgaaattgtggaacgccaattcgttgaagtgattatcgcaccgaaagtttctgctgaagcgcaagaagtcgtgaaacgtaagaaaaatgtgcgtttgcttgaatgtggtgaatggacttctcgttccgaacgtttggatttcaaacgtgtaaacggcggtttattagtacaagatgcggatttaggtatggttggcgtggatgatttaaaagtcgtgagtaaacgtcagccaactgaacaagaattaaaagacttattattctgctggaaagtggcaaaatttgtgaaatccaatgccattgtttacgccaaagacaatcaaactatcggtattggtgcaggtcaaatgagccgcgtatattctgcgaagattgcgggtattaaagcgcaagatgaaggtttagaagtggctggttgtgtgatggcatctgatgcgttcttcccattccgtgatggcattgatgcggcggcgaaagtgggtattcaatgtgtgatccatccaggtggatcaatgcgcgatcaagaagtcattgatgcggcggatgaacataatatggtaatggtattgactggaatgcgacattttagacattaa

SEQ ID NO: 1874 - protein, 532 aa, Haemophilus influenzae
MADRPIRQALLSVSDKTGIVEFAQGLVKRGVKLLSTGGTAKLLAQNGLPVMEVSDYTGFPEMMDGRVKTLHPKVHGGILGRRGTDDAIMQQHAIEGIDMVVVNLYPFAATVAKSDCTLADAVENIDIGGPTMVRSAAKNHKDVAIVVNNHDFNAILAEMDQHQNSLTFETRFDLAIKAFEHTAQYDSMIANYFGQLVKPYHIAKEEEANAKCGQFPRTLNLNFVRKQTMRYGENAHQNAAFYVDLNVKEASVATANQLQGKALSYNNIADTDAALECVKEFDEPACVIVKHANPCGVALGKDILDAYNRAYQTDPTSAFGGIIAFNRELDEKTANEIVERQFVEVIIAPKVSAEAQEVVKRKKNVRLLECGEWTSRSERLDFKRVNGGLLVQDADLGMVGVDDLKVVSKRQPTEQELKDLLFCWKVAKFVKSNAIVYAKDNQTIGIGAGQMSRVYSAKIAGIKAQDEGLEVAGCVMASDAFFPFRDGIDAAAKVGIQCVIHPGGSMRDQEVIDAADEHNMVMVLTGMRHFRH

SEQ ID NO: 1875 - DNA, 1290 bp, Haemophilus influenzae
atgaacatcctcatcatcggaaacggcggtcgtgaacacgctttggcttggaaagctgcacaatctccattagcagataaagtttttgtcgcaccgggtaacgctggtactgcattggaacacaaagtagaaaacgtgaatatttctgcgacagatattcccgcattagtgaaatttgctcaagataaacaaattggattaaccattgttggtcctgaagcccccttagtgattgcggtagttgatgcatttcgtgaagctggactaaaaatttttgggccaactcaagcagcggcgcaattagagggttcaaaagcatttactaaagatttccttgctcgtcataaaatcccaacagcagaatatcaaaactttaccgaagtcgaacctgcattggtttacttgcgtgagaaaggcgcgccaattgtcgttaaagcggatggcttggcggcgggtaaaggcgtaatcgttgcgatgacattgcaagaagccgaagatgcagtacgtgatatgctttctggtaatgcctttggcgaagcgggcagccgagtagtgattgaagaatttctagatggcgaagaagccagttttatcgtcatggtagatggtaaaaacgttgaacctatggcgactagccaagatcataaacgcgtgggcgaaaatgatacggggttaaatacaggcggtatgggcgcgtattcgcctgcaccagtagtaacacccgaaattcatagtcgcattatgaaagaagtgatttacccaaccgttaatggaatggcagcggaaggcagtgtttacacgggtttcctatatgcaggattaatgattatgccaaatgggcagccgaaagtgatcgaatttaattgtcgttttggcgatccagaaacgcagccaataatgctacgtctcaaatcagaccttgttgaactctgtcttaaagcatgtgacggcaaattagatgaagtaatatcacaatgggatccacgagcttctttaggtatcgtattggctgcagagggatacccaaaagattaccgtaaaggcgatgaaatcagcggattgcctaaaagtgcggtcaaaaacgagaaagttttcttagcgggtgtcgcagaacaagaaggcaagctagtcacaaacggcggtcgtgtactttgtgtgactgcattaggtgaaagcgtatttgaggcacaacagaaagcgttaaaactggctgagcaaattcaatggtctgggcgtttttatcgtcgagatattggttacagggctgtggaacgagagttgcaaaaataa

SEQ ID NO: 1876 - protein, 429 aa, Haemophilus influenzae
MNILIIGNGGREHALAWKAAQSPLADKVFVAPGNAGTALEHKVENVNISATDIPALVKFAQDKQIGLTIVGPEAPLVIAVVDAFREAGLKIFGPTQAAAQLEGSKAFTKDFLARHKIPTAEYQNFTEVEPALVYLREKGAPIVVKADGLAAGKGVIVAMTLQEAEDAVRDMLSGNAFGEAGSRVVIEEFLDGEEASFIVMVDGKNVEPMATSQDHKRVGENDTGLNTGGMGAYSPAPVVTPEIHSRIMKEVIYPTVNGMAAEGSVYTGFLYAGLMIMPNGQPKVIEFNCRFGDPETQPIMLRLKSDLVELCLKACDGKLDEVISQWDPRASLGIVLAAEGYPKDYRKGDEISGLPKSAVKNEKVFLAGVAEQEGKLVTNGGRVLCVTALGESVFEAQQKALKLAEQIQWSGRFYRRDIGYRAVERELQK

SEQ ID NO: 1877 - DNA, 1266 bp, Haemophilus influenzae
atgtttacaagaaatatgactatcgctgattacgatccagtattgtggcaagcgatccaagatgaaaatcgtcgtcaagaagaacatatcgaactcattgcatctgaaaactatgcgagtccacgtgtgatggaagcgcaaggttcacaattcactaataaatatgcggaaggctatccaggtaaacgttattacggtggttgtgagtatgctgatattgtggaacagttagcaattgaccgtgcgaaagaattatttggtgcagattacgtgaatgttcaaccgcactctggatcacaagcgaatgctgcggtgtatggtgcattgattaatgcaggcgatactattttaggtatggatttggctcacggtgggcacttaactcacggtgcaaaagtcagtttctctggcaagatttataactctgtgctttatggaatcacagcggatggcttaattgattatgaagatgttcgtcaaaaagcattagaatgtaaaccaaaacttatcgttgctggtttctcggcttattcacaagttgtggattgggcgaaaatgcgtgaaatcgcagatgaagttggtgcatatttatttgtggatatggcgcatgtagcaggattaattgcagcgggtttatatccaaatccactaccgcatgcacatgttgtgacaacaacaacccataaaacattgggcggcccacgtggtggtttaattctttcatcttgtggcgatgaagaaatctacaaaaaattacaatcatccgtatttcctgcaaatcaaggtggtccattagttcatattattgcggcaaaagcagtttgctttaaagaagcattagagcctcaatataaagaataccaagcaaatgtaatcaaaaatgcgaaagcaatggttgaggtatttaaacaacgtggttatgatgttgtgtcaaatggtactgaaaaccacttgttcttagtaagttttattaaacaaggattaacgggtaaagcagcagatgcggcattaggcaaagcaaatattaccgtgaataaaaatgcagtaccaaacgatccgcaaaaaccattcgtcacttctggcatccgtgtaggtacgccatctgtgactcgccgtggtttcaatgaaaatgatgtgcgtgaattagctggctggatgtgtgatgttttagatgctttaggcaaagaaaatgaagaacaagtgattgctgaaactaaagaaaaagtattagcaatttgtaaacgtcttccagtttatccgaaatga

SEQ ID NO: 1878 - protein, 421 aa, Haemophilus influenzae
MFTRNMTIADYDPVLWQAIQDENRRQEEHIELIASENYASPRVMEAQGSQFTNKYAEGYPGKRYYGGCEYADIVEQLAIDRAKELFGADYVNVQPHSGSQANAAVYGALINAGDTILGMDLAHGGHLTHGAKVSFSGKIYNSVLYGITADGLIDYEDVRQKALECKPKLIVAGFSAYSQVVDWAKMREIADEVGAYLFVDMAHVAGLIAAGLYPNPLPHAHVVTTTTHKTLGGPRGGLILSSCGDEEIYKKLQSSVFPANQGGPLVHIIAAKAVCFKEALEPQYKEYQANVIKNAKAMVEVFKQRGYDVVSNGTENHLFLVSFIKQGLTGKAADAALGKANITVNKNAVPNDPQKPFVTSGIRVGTPSVTRRGFNENDVRELAGWMCDVLDALGKENEEQVIAETKEKVLAICKRLPVYPK

SEQ ID NO: 1879 - DNA, 621 bp, Haemophilus influenzae
atgacttatattgttggcttaactggtggcattggtagtggtaaaacaacgattgctaatttatttaccgatcttggcgtacctctagtggatgcggatgtggttgctagagaagtcgtcgcgaaagattcccccttattgtcaaaaattgttgaacattttggggctcaaattttaacggaacaaggcgagcttaatcgcgcggctttacgagagcgagtgtttaagcatgatgaagataaattgtggttaaataatcttttacatcccgctattcgtgaacgaatgaaacaacaactcgctgaacaaactgcgccttacacattatttgtcgtccctttattaatagaaaataaattgaccgcactttgtgatcgtattttggtggtggatgtgagtccacaaactcaacttgctcgttcagctcaacgagataacaataattttgagcaaattcaacgaattatgaattctcaagtttctcaacaagagcgtttaaaatgggcggatgatgtgattaacaatgatgctgatctggctcaaaacttaccgcacttgcagcaaaaggtgctagaattgcaccagttttatttacaacaagcggaaaataaaaatgtctga

SEQ ID NO: 1880 - protein, 206 aa, Haemophilus influenzae
MTYIVGLTGGIGSGKTTIANLFTDLGVPLVDADVVAREVVAKDSPLLSKIVEHFGAQILTEQGELNRAALRERVFKHDEDKLWLNNLLHPAIRERMKQQLAEQTAPYTLFVVPLLIENKLTALCDRILVVDVSPQTQLARSAQRDNNNFEQIQRIMNSQVSQQERLKWADDVINNDADLAQNLPHLQQKVLELHQFYLQQAENKNV

SEQ ID NO: 1881 - DNA, 207 bp, Haemophilus influenzae
atgtctgacgaaatgattgaagtaccttgtccgatttgccaaaaatctgtgccttggataaatgaaagtacttttcgacctttttgtagcaaacgttgccagttaattgatcttggcgaatgggcggctgaagaaaaagcgattccaagtgatactgctgattttgcaatggatccaaatgtgagtgacggatggagcattaaatag

SEQ ID NO: 1882 - protein, 68 aa, Haemophilus influenzae
MSDEMIEVPCPICQKSVPWINESTFRPFCSKRCQLIDLGEWAAEEKAIPSDTADFAMDPNVSDGWSIK

SEQ ID NO: 1883 - DNA, 1248 bp, Haemophilus influenzae
atgcaacaagattatttaagccaacaacgattctccgctcttcctctacatccgattgtgcgaggtgctttggcaaaaaaaggctttgatttttgtactccaattcaggctttatccttgcctatcagtttaaatggacgagatgttgcaggacaagctcaaactggtacaggcaagacaatggcttttttaacggctacttttcaccatcttttaacccaccaagatcctaatcttaaatatcctcacccaagagctttgattttagcacctactcgagaattagcggtacagattagtaatgacgcagaatttcttgcaaaagcgagtggattaaagaccgcacttgcctatggtggcgatggttatgataaacaactacaagcgattgagcgtggcgtcgatattttgattggtacgacggggcgagtcattgattatgtaaaacaaggcgtaattggtttagatgaaatccaagttgtcgtgctagatgaagcagatcgaatgtttgatcttgggtttatccgtgatattcgttatttattgcgtaaatgccccgctccgcaagctcgtttaacgatgttattttcagcgacgctttcttataaagtgcgtgaattagcatttgaagatatgaatgaccctgaatatattgaaattgaaccagaacaaaaaacaggacatcgaattaaagaagaacttttttatccatctaatcaggataaaatggcacttctcttaaccttaatggaagatgaatggcctgaacgctgtattgtatttgcgaataccaaacatcgttgtgaagaaatttggggctatttggcggctgatgggcatcgtgtcggtttactgactggcgatgtagcacagaaaaaacgtttatcgttattaaaacaatttactaatggttatttggatattttagtggcaacagatgtggctgctcgtggcttgcatatttctgatgtgacgcatgttttcaattatgatttacccgatgatcgagaagattatgttcaccgaattgggcgtactggacgagcaggggaaagtggtgtttcgattagttttgcttgcgaagaatatgcgatgaatttaccagcaattgaagaatatattggccattctatccctgtgagccaatatgaaacagaagccttgcttgaactgccgaaaccgtatcggttgaaacgtgcggtgccaccgcaaggacatacaagacatcgttcttatcacacaaaatag

SEQ ID NO: 1884 - protein, 415 aa, Haemophilus influenzae
MQQDYLSQQRFSALPLHPIVRGALAKKGFDFCTPIQALSLPISLNGRDVAGQAQTGTGKTMAFLTATFHHLLTHQDPNLKYPHPRALILAPTRELAVQISNDAEFLAKASGLKTALAYGGDGYDKQLQAIERGVDILIGTTGRVIDYVKQGVIGLDEIQVVVLDEADRMFDLGFIRDIRYLLRKCPAPQARLTMLFSATLSYKVRELAFEDMNDPEYIEIEPEQKTGHRIKEELFYPSNQDKMALLLTLMEDEWPERCIVFANTKHRCEEIWGYLAADGHRVGLLTGDVAQKKRLSLLKQFTNGYLDILVATDVAARGLHISDVTHVFNYDLPDDREDYVHRIGRTGRAGESGVSISFACEEYAMNLPAIEEYIGHSIPVSQYETEALLELPKPYRLKRAVPPQGHTRHRSYHTK

SEQ ID NO: 1885 - DNA, 564 bp, Haemophilus influenzae
atgcgacaagctaaaacagacttagctgaacagattttttcagcgacagatcgtttaatggcaaaagaagggttgaatcaactttctatgcacaaacttgcgaaagaagcaaatgtggccgcaggaacgatttacctttattttaaaaacaaagatgaattgcttgaacaatttgcacacagagtgttttcaatgtttatggcaacacttgaaaaagattttgatgaaactaaaccttttttcgaacaatatcgacaaatgtggaaaaacatttggtatttcttacaagaaaatcccactattctatccaatttaaagcaatatgaatctttgccgaatttcaaggatatttgtaaaaacattaaaaattgccgttgggatttattttgtcatcaagcccaaaaagctggcttattagcggaattatctgaagatattctctttttattaagtttgaaaacggcgataaatttagcctctgatgcaaaatttatcgatttcgatcttaagcctgaaattttagaatctgtgattgaacgctcttggcgtgcgattcagaaataa

SEQ ID NO: 1886 - protein, 187 aa, Haemophilus influenzae
MRQAKTDLAEQIFSATDRLMAKEGLNQLSMHKLAKEANVAAGTIYLYFKNKDELLEQFAHRVFSMFMATLEKDFDETKPFFEQYRQMWKNIWYFLQENPTILSNLKQYESLPNFKDICKNIKNCRWDLFCHQAQKAGLLAELSEDILFLLSLKTAINLASDAKFIDFDLKPEILESVIERSWRAIQK

SEQ ID NO: 1887 - DNA, 1197 bp, Haemophilus influenzae
atgagtcaaactcaacatcaaagaccaaaacgctcacatattttctttatgaaaataattttagtggtatttgtcttaatttttgtcggtgtcatcggttttaatatgataaaaggcgtaatgataagccgagcaattgcaggaatgccagaaccttcaagcccggtaaccgcacttgaagttcaaccgcgtgaatggacgccagttatcaatacaacaggtcttgtgcgtccaaatcaaggcgcaatgctcagtacacaaaatgcgggcgcggtttcacaagtacttgttcaaaatggacaaaatgtgaaaaaaggtgaggtgcttgtggagcttgatagttctgttgaacgagctaatctacaagctgctcaggcacaattatcagcacttcgtcaaacttaccaacgttatgtgggtttattaaatagcaatgctgtatcacgtcaagaaatggataacgcaaaagcggcttatgatgctcaagtagctagtattgaatctctaaaagcagcaattgaacgtcgtaaaattgttgcgccatttgatggcaaagcaggtattgtgaaagtaaatgtgggtcaatatgtgaatgttggaacagaaattgtgcgtgtagaagatactagctcaatgaaagtggattttgctctttcacaaaatgatttagataaattacatatcggtcagcgcgttacagcgacaacagatgctcgcttgggcgaaacattttcagctcgaatcactgcgattgaacctgccattaattcatcaacaggtttagttgatgttcaggctacttttgatcctgaagatgggcataaattgctttcaggtatgttctctcgcttacgcattgcacttccaactgaaacaaatcaagttgtcgttccacaagtagctattagctacaatatgtatggtgaaattgcctatttacttgaaccattatctgaagaagaaaaaggaaaaatgtcaggtaatgaaaaattggatcgtctctatcgtgcgaaacagatcaccgtatttactaaagatcgtcagggtgtttatgctcaattacagggaaatgaagttaaagcgggagataaaattattacaggcggtcagcaaggtattggtaatggaagtcttgtggaatggattaaaaaagacattgtgggtgcagtagagcctgcacataaaacaccactttaa

SEQ ID NO: 1888 - protein, 398 aa, Haemophilus influenzae
MSQTQHQRPKRSHIFFMKIILVVFVLIFVGVIGFNMIKGVMISRAIAGMPEPSSPVTALEVQPREWTPVINTTGLVRPNQGAMLSTQNAGAVSQVLVQNGQNVKKGEVLVELDSSVERANLQAAQAQLSALRQTYQRYVGLLNSNAVSRQEMDNAKAAYDAQVASIESLKAAIERRKIVAPFDGKAGIVKVNVGQYVNVGTEIVRVEDTSSMKVDFALSQNDLDKLHIGQRVTATTDARLGETFSARITAIEPAINSSTGLVDVQATFDPEDGHKLLSGMFSRLRIALPTETNQVVVPQVAISYNMYGEIAYLLEPLSEEEKGKMSGNEKLDRLYRAKQITVFTKDRQGVYAQLQGNEVKAGDKIITGGQQGIGNGSLVEWIKKDIVGAVEPAHKTPL

SEQ ID NO: 1889 - DNA, 3081 bp, Haemophilus influenzae
atgaaatttaccgatatatttattcgtcgtcctgttttagcagtttcaattagtttgttaatgattattttagggttgcaagcaatctcgaaattggcagtgcgtgaataccctaaaatgactactacagtcattacagtgagtaccgcatatccaggggcagatgcgaatttaatccaagcatttgttacgtcaaaattggaagaatctatcgcgcaagccgataatattgattatatgtcttcgactagtgcacctagtagttcgactattacaataaaaatgaaattaaataccgatcctgcaggcgcgttagcagatgtgttagccaaagtgaatgcagtaaagtcagcattaccaaatggtattgaagatcctagtgtatcctcttcttcaggtgggagcggtattatgtatatcagtttccgatctaaaaaactagattctagtcaggtaactgattacatcaatcgtgtagtcaaaccacagttttttaccattgagggtgttgccgaagtacaggtatttggtgcagctgaatatgcattacgtatttggcttgatccacaaaaaatggcagctcaaaatctttctgtgccaacagtgatgtctgccctttctgcaaataatgtacaaacggctgcggggaacgataatggctattatgtgagttatcgtaacaaagtggagactacaacgaaatcagtggaacaactcagcaacttaattatttcatcaaatggcgatgatttagtgcgtttgcgtgatattgcaaccgttgaattaaataaagaaaatgataattcacgtgctacggcaaatggcgcagagtccgttgtgttagccatcaatccaacctcgacagcaaaccctttgactgtcgcagaaaaaattcgccctttatatgaaagtataaaaacacaactgccagacagtatggaaagcgatattctttatgaccgcactattgccattaatagctctattcacgaggtcataaaaactattggtgaagctactttgatcgttttagtggtaattttaatgtttatcggttcgttccgtgctattttaattccaatattggctattccaatttctcttattggcgtattaatgctgctacaaagtttcaacttttctattaatttaatgaccttgcttgctttaattcttgccataggtttagtcgtagatgatgctattgtggtgctggagaatattgatcgtcatattaaagcgggagaaacgccattccgagcggcgattattggtacgcgtgaaattgcagtccctgttatttctatgactatcgcattgatcgcagtttactcaccaatggctttaatggggggcattactggcacattgtttaaagagtttgctttaacccttgctggtgcagtatttatttctggtgttgtggcattaacgttatcgccaatgatgagtagtaagttactcaaatccaatactaaaccaacatggatggaagaacgcgtagaacataccttaggtaaagtaaatcgtgtttacgaatacatgcttgatctcgttatgctcaatcgtaaatcaatgctggcttttgcggtcgtgattttctcaacgctcccatttttgtttaattcactttctagtgaattaacgccaaatgaagataaaggcgcatttattgcaattggtaacgcaccatctagcgtaaatgtggattacattcaaaatgcaatgcaaccatatatgaaaaatgtaatggaaacacccgaagtttcttttggtatgagcattgccggtgcgccaacttctaatagctcgttaaatatcatcacattgaaagattggaaagaacgttcacgtaaacaatctgcaataatgaatgaaattaatgaaaaagcaaaatcgattccagaagtgtcagtatcagcatttaacattcctgaaattgatacaggggaacaaggcgctccagtctctattgtattgaaaactgcacaagattataaatctttggcaaacaccgcagagaaattcctcagtgcgatgaaagcctctggcaaatttatttatacaaatttagatttgacctatgacacagcacaaatgacaatttcagtagataaagagaaagcgggtacttacggcatcacgatgcaacaaatcagtaatactttagggagtttcttatctggtgcgacagttacgcgtgtggatgtggatggacgtgcttataaagtcatttcgcaggtaaaacgagatgatcgcttatcgccagaaagtttccaaaattattatttaactgcatctaatggtcaatcagtgccattaagtagtgttattagtatgaaattagaaactcagccaacatcattaccgcgtttcagtcagttaaattcggctgaaatcagtgctgtaccaatgccgggtatatcaagtggtgatgccattgcttggcttcaacaacaggcaaatgataatttgccacaaggatacacttatgatttcaaatccgaagctcgtcaattagtccaagaaggcaacgcattagccgtcacttttgcattggctgttatcatcatattcttggtacttgccattcagtttgaatctatacgtgacccaatggtaattatgatttctgtaccattagccgtaagtggtgcattggtgagcttaaatattttatccttctttagcatcgcaggaacaacattaaatatctactctcaagttgggttgattactctcgtgggattaatcaccaaacacggtatcttaatgtgcgaagtggcaaaagaagaacagctaaactatggtaaaactcgaattgaggcaatcactcatgcggcaaaagtgcgtttgcgtccaattctaatgacaacggcggcaatggtagcaggcttaattccattactctatgcaacaggtgcaggagcggtatctcgctttagtattgggatagtgattgtagcgggattatccattggtactattttcaccttgttcgtcttgcctgtagtatatagctatgtcgcaactgaacacaaaccattaccggtttttgatgaaaataaaacaacccactaa

SEQ ID NO: 1890 - protein, 1026 aa, Haemophilus influenzae
MKFTDIFIRRPVLAVSISLLMIILGLQAISKLAVREYPKMTTTVITVSTAYPGADANLIQAFVTSKLEESIAQADNIDYMSSTSAPSSSTITIKMKLNTDPAGALADVLAKVNAVKSALPNGIEDPSVSSSSGGSGIMYISFRSKKLDSSQVTDYINRVVKPQFFTIEGVAEVQVFGAAEYALRIWLDPQKMAAQNLSVPTVMSALSANNVQTAAGNDNGYYVSYRNKVETTTKSVEQLSNLIISSNGDDLVRLRDIATVELNKENDNSRATANGAESVVLAINPTSTANPLTVAEKIRPLYESIKTQLPDSMESDILYDRTIAINSSIHEVIKTIGEATLIVLVVILMFIGSFRAILIPILAIPISLIGVLMLLQSFNFSINLMTLLALILAIGLVVDDAIVVLENIDRHIKAGETPFRAAIIGTREIAVPVISMTIALIAVYSPMALMGGITGTLFKEFALTLAGAVFISGVVALTLSPMMSSKLLKSNTKPTWMEERVEHTLGKVNRVYEYMLDLVMLNRKSMLAFAVVIFSTLPFLFNSLSSELTPNEDKGAFIAIGNAPSSVNVDYIQNAMQPYMKNVMETPEVSFGMSIAGAPTSNSSLNIITLKDWKERSRKQSAIMNEINEKAKSIPEVSVSAFNIPEIDTGEQGAPVSIVLKTAQDYKSLANTAEKFLSAMKASGKFIYTNLDLTYDTAQMTISVDKEKAGTYGITMQQISNTLGSFLSGATVTRVDVDGRAYKVISQVKRDDRLSPESFQNYYLTASNGQSVPLSSVISMKLETQPTSLPRFSQLNSAEISAVPMPGISSGDAIAWLQQQANDNLPQGYTYDFKSEARQLVQEGNALAVTFALAVIIIFLVLAIQFESIRDPMVIMISVPLAVSGALVSLNILSFFSIAGTTLNIYSQVGLITLVGLITKHGILMCEVAKEEQLNYGKTRIEAITHAAKVRLRPILMTTAAMVAGLIPLLYATGAGAVSRFSIGIVIVAGLSIGTIFTLFVLPVVYSYVATEHKPLPVFDENKTTH

SEQ ID NO: 1891 - DNA, 771 bp, Haemophilus influenzae
gtggcacatcgagattttgctgcgcgtcgtagctcaaataataagaaaaaaaataagaaaaagaatacaaatgtcttgatttttcttgctttatttattgttctagtttttgttgttggactttatttgttgaaaaatcagaacagtaaggtaagcgtgcagcaagctataacacaacaggaaaaagctcaacctaaaagtgtgttacctaatcgtccagaggaagtgtggagttatattaaagccttagaaacgcgtactgtacctgtagataataatccagcgagtgtagaacaaaatatgcgtttaacagaagaacaacgtcaagttttaattcaaatagaaagagatcaaaaagcggctgatgaagctagaaaactggctgagcaacagagaatagaagatgcaacgagaactcaatccaaaaaaacggaagatatgaaaaatacagaggcagaaatcgtaaaattggaatcaattaaaaagcaagactcacagaaaattgaaagcgcaaaaaaagtagaacaaataaaaacggttaataatgtacgggatagcaagaaatttggtttacaatgcggtgctttcaaaaatcgagcacaagctgaaaatttgcaaggtcgtttacagatgacaggattaaatgctcaaatacaaactaacggcgaatggaaccgtgttcgtgtagcaagttttgatactcgagagcttgcagtacaggcgcaaagtagagctaaaactgttaccgattgtgttgtgattggtatgtaa

SEQ ID NO: 1892 - protein, 256 aa, Haemophilus influenzae
MAHRDFAARRSSNNKKKNKKKNTNVLIFLALFIVLVFVVGLYLLKNQNSKVSVQQAITQQEKAQPKSVLPNRPEEVWSYIKALETRTVPVDNNPASVEQNMRLTEEQRQVLIQIERDQKAADEARKLAEQQRIEDATRTQSKKTEDMKNTEAEIVKLESIKKQDSQKIESAKKVEQIKTVNNVRDSKKFGLQCGAFKNRAQAENLQGRLQMTGLNAQIQTNGEWNRVRVASFDTRELAVQAQSRAKTVTDCVVIGM

SEQ ID NO: 1893 - DNA, 1533 bp, Haemophilus influenzae
atggacaattccgcaaaaaaatacccgcctattcaaggtggcgcgctgattttattaacgctggctttatctctcgccacctttatgcaggtattagattctaccattgcaaatgtggcgattcctactattgctggcgatcttggcgcatcttttagtcaaggtacgtgggtaattacttcttttggggtagcaaatgcgatttctattccaataacgggttggttagcaaaacgttttggcgaagtgcggttatttttagtctcaacttttttatttgttgtctcttcttggctctgtgggattgcggatagccttgaagcattaattatttaccgagtcattcaaggtgctgtcgcaggcccagtgatccctctttcgcaaagtttattattaaataattattcaccagaaaaacgcggaatggcattggcattttggtcaatgactattgtggttgcacctatttttggcccaattttaggcggatggattagcgataatatccattggggatggatcttttttatcaatgttccgatcggtttgttagttgtgctaatcagctggaagattttgggaagcagagaaagtgaaattgttcatcaacctattgataaagtcggtttagtcttacttgtcttaggcgtgggatctttgcaattaatgcttgatcagggacgtgagcaagattggtttaattctaatgaaatcattatattagctgttgttgctgttatttgcctgattgctttggttatttgggaattgacagatgataatcctgtagtagatatttcgcttttccattctcgtaattttagcgtagggtgtttatgtaccagtttagcctttttgatttatttaggttctgtggtattaattccgctcttgctacagcaagtcttccattacaccgcgacgtgggctgggcttgcggcttccccagttggattattcccaattttgctttcaccgattattgggcgtttcggttataagatcgatatgcgagttttagtgacgataagttttattgtatatgcaataacattttattggagagcggtgactttcgagccatcaatgacatttactgatgtagctttaccacaattagtgcaaggtttagcggtgtcctgtttctttatgccacttactacaataacgctgtctggcttgcctgagcataaaatggcttcagcctctagcttatttaactttttgagaactttagcgggttctgtaggaacatctttgaccacatttatgtggtataaccgtgaagctgttcaccacactcaattaacagaacacattaatccttataacccaatttcccaaagtttttaccatcaaatgaatcaatttggtttaagtgatacgcaaacttcagcttacctcgctcaacaaataacatcgcaaggatttattattggcgcaaatgaaatattttggttatcagctatgggattcttaggattgcttattgtgatttggtttgcaaaaccaccttttggtactcagcattaa

SEQ ID NO: 1894 - protein, 510 aa, Haemophilus influenzae
MDNSAKKYPPIQGGALILLTLALSLATFMQVLDSTIANVAIPTIAGDLGASFSQGTWVITSFGVANAISIPITGWLAKRFGEVRLFLVSTFLFVVSSWLCGIADSLEALIIYRVIQGAVAGPVIPLSQSLLLNNYSPEKRGMALAFWSMTIVVAPIFGPILGGWISDNIHWGWIFFINVPIGLLVVLISWKILGSRESEIVHQPIDKVGLVLLVLGVGSLQLMLDQGREQDWFNSNEIIILAVVAVICLIALVIWELTDDNPVVDISLFHSRNFSVGCLCTSLAFLIYLGSVVLIPLLLQQVFHYTATWAGLAASPVGLFPILLSPIIGRFGYKIDMRVLVTISFIVYAITFYWRAVTFEPSMTFTDVALPQLVQGLAVSCFFMPLTTITLSGLPEHKMASASSLFNFLRTLAGSVGTSLTTFMWYNREAVHHTQLTEHINPYNPISQSFYHQMNQFGLSDTQTSAYLAQQITSQGFIIGANEIFWLSAMGFLGLLIVIWFAKPPFGTQH

SEQ ID NO: 1895 - DNA, 1173 bp, Haemophilus influenzae
atgacgcaaattgcaactgaaaacccatcaactaaatctgtatcaaataaaactgaccgtaaaaaaggcttaagcatttttattcttctccttcttattattggtattgcttgtgctttgtattggtttttcttcttgaaggattttgaagaaacagaagatgcttatgtgggtggaaatcaagtaatggtatcatcacaagttgcaggtaatgtagcgaagattaatgctgacaatatggataaagtccatgcaggtgatattctagttgaattggatgatacgaatgcgaaacttagttttgaacaagcgaaaagcaatctctccaatgctgtacgtcaggtagaacaactcggtttcactgtgcaacaattgcaatcagctgtgcacgccaatgaaatttctttagctcaagctcaaggcaatttggctcgccgagttcaacttgaaaaaatgggtgcgattgataaagaatctttccaacacgcaaaagaagctgtcgagcttgccaaagcaaatttaaatgcctctaaaaatcaattggctgctaatcaggctttattgagtaacgttccattacgtgaacaaccgcaaatacagaatgcgataaactcgcttaaacaggcttggttaaatttgcaacgtacaaaaattagaagtccaattgatggctatgtggcgcgtcgtaatgttcaagttgggcaagccgtttcagtgggtggcgcattaatggcggtggtatctaatgaacaaatgtggctagaagctaacttcaaagaaacccaattaacgaatatgcgcattggtcagccagtaaaaatccattttgatttatacggtaaaaataaagaatttgatggcgtgataaatggtattgaaatggggactggcaatgcattttctcttttgccttcacaaaatgctacgggtaactggattaaagtggtgcaacgcgtacctgtgcgaattaaattagatccacaacaatttacagaaacgccattgagaattggtctttctgcaacggcaaaagtaagaatttcagattcatcaggcgcaatgctacgagaaaaagcagaaccgaaaacgttattttctactgatacacttaaatatgatgaaagtgcggtagaaaatttgattgaatctatcattcagcaaaacagccattaa

SEQ ID NO: 1896 - protein, 390 aa, Haemophilus influenzae
MTQIATENPSTKSVSNKTDRKKGLSIFILLLLIIGIACALYWFFFLKDFEETEDAYVGGNQVMVSSQVAGNVAKINADNMDKVHAGDILVELDDTNAKLSFEQAKSNLSNAVRQVEQLGFTVQQLQSAVHANEISLAQAQGNLARRVQLEKMGAIDKESFQHAKEAVELAKANLNASKNQLAANQALLSNVPLREQPQIQNAINSLKQAWLNLQRTKIRSPIDGYVARRNVQVGQAVSVGGALMAVVSNEQMWLEANFKETQLTNMRIGQPVKIHFDLYGKNKEFDGVINGIEMGTGNAFSLLPSQNATGNWIKVVQRVPVRIKLDPQQFTETPLRIGLSATAKVRISDSSGAMLREKAEPKTLFSTDTLKYDESAVENLIESIIQQNSH

SEQ ID NO: 1897 - DNA, 483 bp, Haemophilus influenzae
atgacatttagtttaattgtggcgacaacattaaataatgtgattggtaaagataaccaaatgccttggcacttgcctgcagatttagcttggtttcgtcagaacaccactggtaaacctgtcattatggggcgtaaaacctttgaaagtattggtcgtccactacctaaacgtaccaatatcgtactttctcgccagctttttgaacacgaaggtgtgatatggaaagatagctttgaaagtgcggtcaattttgtcagagattttgatgaaattatgttgattggtggaggagagttattcaaacaatatttacccaaagcagataagttataccttactcaaattcaaacagaactagatggtgatacttttttccctcaattgaattgggaggagtgggaaattgaatttgatgaatatcgtaaggcagatgaacaaaatcgctatgattgtcgatttttgattcttacacgaaaataa

SEQ ID NO: 1898 - protein, 160 aa, Haemophilus influenzae
MTFSLIVATTLNNVIGKDNQMPWHLPADLAWFRQNTTGKPVIMGRKTFESIGRPLPKRTNIVLSRQLFEHEGVIWKDSFESAVNFVRDFDEIMLIGGGELFKQYLPKADKLYLTQIQTELDGDTFFPQLNWEEWEIEFDEYRKADEQNRYDCRFLILTRK

SEQ ID NO: 1899 - DNA, 1107 bp, Haemophilus influenzae
atgaacaaaaaaacaatcgttgtgaaattcggtacaagcacgctaactcagggttcgccaaaactgaattcaccgcacatgatggaaatcgttcgtcaaattgcacaactgcataatgatggatttcgtatagtgatcgtgacttctggtgcgattgcagcgggtcgccattatttaaatcatcctcaattaccacccactatcgcctcaaagcaactgcttgcagcggttggtcagagccaattaattcaggcttgggaaaaattatttgctatttatgatatccatatcgggcaacttttattaacccgtgcagatattgaagatcgcgaacgttttttaaatgcgcgagatactttacacgcacttttagataaccacattattcctgtgattaatgaaaatgacgcagtggcgactgcggaaattaaagtaggtgacaatgacaatttatcggcattagtcgctattcttgtgcaagcggaacagctttatttattgactgatcaacaaggtttatttgatagtgatccgcgtaaaaattctgaagcgaaattaattccagttgtagaacaaatcaccgatcatattcgatcaattgcaggaggaagtggtacaaatcttggtactggtggaatgatgaccaaaatcattgctgccgatgttgcgactcgctctggaattgaaaccattattgctccaggtaatcgcccaaatgtaattgcagatcttgcttatgaacaaaatattggtacaaaatttattgcacaccaatctgatcgattagaaagtcgcaaacaatggcttttcgctgcgccatcggcaggtattattaccattgataacggtgcgcaaaatgccattcttgaacaaaataaatctttattacccgctggtattattaacgtgaaagggcgtttttcgcgtggtgaagtagtcaaaatacgcactcaatcaggtaaagacattgcgctgggtatgccacgctataacagcgatgccctgcaattaattaagggcagaaaatcagcagacattgagaatgttttaggctatgaatatggcgcagtggcaatgcatcgtgatgatatgattattttgtcataa

SEQ ID NO: 1900 - protein, 368 aa, Haemophilus influenzae
MNKKTIVVKFGTSTLTQGSPKLNSPHMMEIVRQIAQLHNDGFRIVIVTSGAIAAGRHYLNHPQLPPTIASKQLLAAVGQSQLIQAWEKLFAIYDIHIGQLLLTRADIEDRERFLNARDTLHALLDNHIIPVINENDAVATAEIKVGDNDNLSALVAILVQAEQLYLLTDQQGLFDSDPRKNSEAKLIPVVEQITDHIRSIAGGSGTNLGTGGMMTKIIAADVATRSGIETIIAPGNRPNVIADLAYEQNIGTKFIAHQSDRLESRKQWLFAAPSAGIITIDNGAQNAILEQNKSLLPAGIINVKGRFSRGEVVKIRTQSGKDIALGMPRYNSDALQLIKGRKSADIENVLGYEYGAVAMHRDDMIILS

SEQ ID NO: 1901 - DNA, 591 bp, Haemophilus influenzae
gtgatcgattttgatggctaccgtccaaatgtgggtattgtgatttgtaatcgcaaagggcaagtgctttgggcgaagcgttgtggacaaaattcgtggcagtttccgcaaggtggcattaatgataatgaaagtgccgagcaagcgatgtatcgcgaactacacgaggaagttggtttacaacctaaagatgtgcgtctgttatatgtttctaaacattggttacgctataaattgccaaagcgtttattgcgttatgacagcaagccgatgtgtattgggcagaaacaacgctggtttttgctacagcttgttagcgatgaaaaaaacatcaatatgcaaacaactaaatcgccagaatttgacgggtggcgttgggtaagtttttggtatcctgttcgtcaagttgtgtcttttaagcgagatgtttatcgaaaggtaatgaaagagtttgcttcgatactatttacggacaacccactaatattttccgcatctcgtgaagcaaattcacagcattattcggcaaacaaaaaatattctcagacaaaatacacgaaacgccatttttataaatcaagaggccaataa

SEQ ID NO: 1902 - protein, 196 aa, Haemophilus influenzae
MIDFDGYRPNVGIVICNRKGQVLWAKRCGQNSWQFPQGGINDNESAEQAMYRELHEEVGLQPKDVRLLYVSKHWLRYKLPKRLLRYDSKPMCIGQKQRWFLLQLVSDEKNINMQTTKSPEFDGWRWVSFWYPVRQVVSFKRDVYRKVMKEFASILFTDNPLIFSASREANSQHYSANKKYSQTKYTKRHFYKSRGQ

SEQ ID NO: 1903 - DNA, 795 bp, Haemophilus influenzae
atgttcacttttattcttctttgtttacttgttggtgcattagcgggttttcttgcaggattatttggtatcggcggtgggttagtaattgtgccaacgttagtgtatttactgcctattgtagatgtaccagagtctttgttgatgtctaccgcacttggaacatcatttgctaccattgtgattactggcattggatcggcacaacgtcatcataaattaggtaacatagtctggcaggcagttcgcattttagctccggttattatgttttctgtttttatttgtggtttattcattggaagacttgatcgtgaaatttctgccaaaatttttgcttgcttagtggtatatttagccacaaaaatggtactttcgattaaaaaagatcaagttacaacaaaatcacttacccctctttcttccgtaattggcggtattttgattggtatgacatctagtgctgcgggaattggcggtggtggatttattgtaccgtttttaactgctcgtggcattaatatcaaacaagctatcggttcttccgcattttgtgggatgttattgggcatatcagggatgtttagttttatagtgagtggttggggaaatccattaatgcctgaatattcgctcggttacatttatcttcccgcagtgttaggcattactgccacttcattttttacttccaaattaggcgcgagtgcaaccgctaaattgcctgtttcaaccctaaaaaaaggtttcgcccttttcttaattgtggttgcgatcaatatgtttctgaaataa

SEQ ID NO: 1904 - protein, 264 aa, Haemophilus influenzae
MFTFILLCLLVGALAGFLAGLFGIGGGLVIVPTLVYLLPIVDVPESLLMSTALGTSFATIVITGIGSAQRHHKLGNIVWQAVRILAPVIMFSVFICGLFIGRLDREISAKIFACLVVYLATKMVLSIKKDQVTTKSLTPLSSVIGGILIGMTSSAAGIGGGGFIVPFLTARGINIKQAIGSSAFCGMLLGISGMFSFIVSGWGNPLMPEYSLGYIYLPAVLGITATSFFTSKLGASATAKLPVSTLKKGFALFLIVVAINMFLK

SEQ ID NO: 1905 - DNA, 807 bp, Haemophilus influenzae
atgaattcaaattatttacttcttccccactttgatccgagtatttttacgctcggcgatagcaatatcggcttacgttggtatggtttgatgtaccttttaggttttgtttttgcacgttggcttgcggttcgccgtgctaatcgcccaaatagcggttggacagtagatcaagttgataccttacttttcaatggttttatgggggtgtttattggcggacgtgttggcgatgtatttttctataatctcgatcatttcttacaagaaccactttatttattccgcgtttgggaaggtggaatgtcgttccacggtggcttaattggtgtaattgttgctatgatttggacatcctattcacaaaaacgtaatttttggcaaacggctgattttgttgcgcctttgattccgtttggtttaggtttaggcagaattggtaatttcattaatcttgaactatggggacgcgaaacgaatgtgccttgggcaatgattttcccgaatgatcctcttttactgcctcgtcatccatcacaactttatgaagcctttttagaaggcctggtgttgtttgcgattctgaatatttttattaaaaagccacgtccaatggcttctgttgcgggtttattcttaattggttatggtgtcttccgttttattgtggaatatgtgcgtgaacctgaagttgaaaatttctttgggattattacacgagggcaagccctttgcttgccgatgattattggtggtgctttcattatggcttgggcttattcacgcaaaagtgcggtcataaaatag

SEQ ID NO: 1906 - protein, 268 aa, Haemophilus influenzae
MNSNYLLLPHFDPSIFTLGDSNIGLRWYGLMYLLGFVFARWLAVRRANRPNSGWTVDQVDTLLFNGFMGVFIGGRVGDVFFYNLDHFLQEPLYLFRVWEGGMSFHGGLIGVIVAMIWTSYSQKRNFWQTADFVAPLIPFGLGLGRIGNFINLELWGRETNVPWAMIFPNDPLLLPRHPSQLYEAFLEGLVLFAILNIFIKKPRPMASVAGLFLIGYGVFRFIVEYVREPEVENFFGIITRGQALCLPMIIGGAFIMAWAYSRKSAVIK

SEQ ID NO: 1907 - DNA, 852 bp, Haemophilus influenzae
atgaagcaatatcttgagctttgtcgccgcattgttagtgaaggggaatgggttgccaatgaacgtacaggtaagcattgcctcacggtcattaatgcagatttagaatatgatgtggcgaataatcaatttccgctgattactacccgtaaaagttattggaaaacggccattgctgaatttctaggttatattcgtggatatgacaatgccgctgatttccgcgcacttggcacgaaaacttgggatgctaatgcgaatgaaaatgcagcttggcttgcaaatccgcatcgtagaggcgttgatgatatggggcgcgtatatggtgtgcaaggcagagcatggcgtaagcctaatggagaaaccatagatcagctacgtaaaattgttaataacttaacgaaaggtattgatgatagaggagagattttaactttttttaaccctggggaatttgatcttggttgtcttcgtccttgtatgcacacgcatactttttctcttgtgggcgatactttacatcttactagttatcaacgttcctgtgatgttccgcttggattgaatttcaatcaaattcaggtgtttaccttcttagtgcttatggctcagatcacgggcaaaaaagccggcaaggcatatcataaaattgtgaatgcgcatatttatgaagatcagcttgagttaatgcgtgacgtacaacttaaacgcgagcctttcccattaccaaaattagaaatcaatccagatataaaaacccttgaagatttagaaacttgggtcacgatggatgattttaaagtcgttggctatcaatctcatgagccaattaaatatcctttttccgtctaa

SEQ ID NO: 1908 - protein, 283 aa, Haemophilus influenzae
MKQYLELCRRIVSEGEWVANERTGKHCLTVINADLEYDVANNQFPLITTRKSYWKTAIAEFLGYIRGYDNAADFRALGTKTWDANANENAAWLANPHRRGVDDMGRVYGVQGRAWRKPNGETIDQLRKIVNNLTKGIDDRGEILTFFNPGEFDLGCLRPCMHTHTFSLVGDTLHLTSYQRSCDVPLGLNFNQIQVFTFLVLMAQITGKKAGKAYHKIVNAHIYEDQLELMRDVQLKREPFPLPKLEINPDIKTLEDLETWVTMDDFKVVGYQSHEPIKYPFSV

SEQ ID NO: 1909 - DNA, 480 bp, Haemophilus influenzae
atgcgctacgcccttgagcttgccgataaagcggaagcgttaggtgagattcctgtgggggctgtgctggtggatgacgctggaaatattattggagaaggttggaatctctccattgttcaaagtgatcctactgcacatgctgaaattatcgctttgcgtaatggcgcgaaaaatattcaaaattatcgcctactgaatagcacgctttatgtgacattagagccttgcacaatgtgtgcaggggcaattttgcatagccgtattaaacgccttgtgttcggtgcatctgattataaaactggcgcgattggatcacgttttcatttttttgatgattacaagatgaatcatactttagagattacatctggcgtattggcagaagagtgtagtcaaaaattgagtacattttttcagaaaagacgcgaggagaaaaaaatagagaaagcattattaaaaagtctgagtgataagtaa

SEQ ID NO: 1910 - protein, 159 aa, Haemophilus influenzae
MRYALELADKAEALGEIPVGAVLVDDAGNIIGEGWNLSIVQSDPTAHAEIIALRNGAKNIQNYRLLNSTLYVTLEPCTMCAGAILHSRIKRLVFGASDYKTGAIGSRFHFFDDYKMNHTLEITSGVLAEECSQKLSTFFQKRREEKKIEKALLKSLSDK

SEQ ID NO: 1911 - DNA, 273 bp, Haemophilus influenzae
atggatgtacttgagcaatctccctttgccaaaataatgaaaaaaggtcttgccatcaatgaacttaatcaaaaatttaaccgcatttttccacaggaatttcacggcaaatttcgtattggtaatatgacagataactcaatttttattgaaacagcaaatgcgatcgttcgccaaggaattttattcagacagatagaattgttgaaactcattcaagaagaatttccgaaagtaacaggatttgagataacgatcaatcctggattttaa

SEQ ID NO: 1912 - protein, 90 aa, Haemophilus influenzae
MDVLEQSPFAKIMKKGLAINELNQKFNRIFPQEFHGKFRIGNMTDNSIFIETANAIVRQGILFRQIELLKLIQEEFPKVTGFEITINPGF

SEQ ID NO: 1913 - DNA, 303 bp, Haemophilus influenzae
atgatttcaggcactgtcaaaccgaatttttggtcgcgattacttttaagtatcatcgcgatttttgctttgcctaacgcacaaagttttgaaaatcaaaataatacggaaaattattcctcaagtgtttccattcaacaagcgttggaaacggtaaaagtagcacgtgaagtgcaacgacaagccattcctcaaccttcaatttcccgtcaaactgaaaaacaacctaaaattcaaccgcacttttttgctgaagtgttgaatcttagtgcgccaattcgagcaggccccttgcttatttaa

SEQ ID NO: 1914 - protein, 100 aa, Haemophilus influenzae
MISGTVKPNFWSRLLLSIIAIFALPNAQSFENQNNTENYSSSVSIQQALETVKVAREVQRQAIPQPSISRQTEKQPKIQPHFFAEVLNLSAPIRAGPLLI

SEQ ID NO: 1915 - DNA, 2706 bp, Haemophilus influenzae
atgagcattttaacaagaatttttggtagtcgtaatgaacgcgttttacgtaaattaaaaaaacaagtcgtaaaaattaataaaatggagcctgcttttgaggcattaagtgatgatgaattaaaagcaaaaacacaagagtttcgagatcgtttaagtggtggcgaaactttgcaacaaattttaccagaagcattcgcaacggtacgcgaagcaagtaagcgtgtgcttggtatgcgccattttgatgttcagcttatcggtggagtggtattgaccaatcgttgtattgcagaaatgcgtactggtgaaggtaaaacattaacggcgactttgccttgttatttaatcgcacttgaaggtaaaggcgttcatgttgtcacggtgaatgattatcttgctcgccgagatgcagaaacaaaccgtccgttatttgaatttttgggtatgagcgtaggcgtaaatattcctggtttatcgccagaagaaaaacgtgcagcttatgcggcagatattacttatgcaaccaatagtgaacttggttttgattatttacgtgacaacttagcccactcaaaagaagagcgtttccaacgtactttaggctatgcgttggtggatgaagtggattctatcttaatcgatgaagcgcgtacgccattgattatttctggtcaggcagaaaacagttcagagctttatattgcggtaaataaattgatcccaagtttaattaaacaagaaaaagaagatacggaagaatatcaaggagagggcgatttcactttagatttgaaatctaaacaagcgcatttaaccgaacgtggtcaagaaaaagtagaagattggttaattgcacaaggtttaatgcctgagggggactctttgtattctcctagtcgaattgtattgcttcatcacgttatggctgcattgcgtgcgcacacattgtttgaaaaagatgtcgattacattgtgaaagacggtgaaatcgtgattgttgatgaacatactggtcgtacaatggcggggcgtcgttggtcagatggtttgcaccaagccattgaggcaaaagaaggggtggatgttaagagcgaaaaccaaactgttgcgtcaatttcttatcaaaactacttccgtttatatgaacgtcttgcgggtatgacggggactgcggataccgaagcatttgagttccaacaaatttatggtttggaaactgttgtaattccaacaaatcgtccaatgattcgtgatgatcgcactgatgtgatgtttgaaaatgaacaatataaatttaatgcgattattgaagacattaaagattgtgtagaacgccagcaaccagtattagtggggacgatttcagtcgaaaaatcagaagaattatctaaagcgttagataaagcaggtataaaacacaatgtgttgaatgcgaaattccaccaacaagaagcggaaatcgtggcagaagcaggatttcctagtgcagtgactatcgcaacgaatatggcggggcgaggtacggatattattcttggcggtaactggaaagcgcaggctgccaaattagaaaatccaactcaagaacaaattgaagcccttaaagcagagtgggagaaaaaccacgaaattgtaatgaaagcgggtgggttgcatattatcggtacagagcgtcacgaatctcgtcgtattgataaccagttgcgcggtcgttctgggcgtcaaggtgaccccggttcttctcgtttctatctttctttagaagatggtttaatgcgcatttatttgaatgagggtaagctcaatttaatgcgtaaagcgttcacggtagcaggcgaggcaatggagtcgaaaatgttggcgaaagtgattgcatctgctcaagcaaaagttgaggcgttccattttgatggccgtaaaaacctacttgaatatgatgatgtggcaaatgaccaacgtcatgcgatttatgagcaacgcaatcatttgcttgataatgatgatatttctgaaactatcaacgctattcgccacgatgtgtttaatggtgtgattgatcaatatattccaccacaatctttggaagaacaatgggatattaaagggcttgaagaacgtttatctcaagagtttggtatggaattaccgatttctaattggttggaagaagataataatcttcacgaagaaagtttgcgcgaacgcattgtggaaattgcagaaaaggaatacaaagaaaaagaggctttggttggcgaagacgctatgcgccattttgaaaaaggtgttatgttgcaaaccttagatgaactttggaaagaacacttagcttcgatggattatttacgccaaggtattcatttacgtggctatgcgcaaaaagatccaaaacaagagtataaaaaagaatctttccgtatgtttacggaaatgttggattctttaaaacaccaggttatcacgactttaacccgtgtacgtgtgcgtactcaagaagaaatggaagaagctgaacgtgctcgtcaagaaatggcagcacgtatcaatcaaaataatttacctgtggatgaaaatagtcagacaactcaaaattcagagactgaagattattcagatcgtcgcattggtcgcaacgagccttgtccttgtgggtcgggtaaaaaatataagcattgtcacggcagtcgtgtggcacgccagtaa

SEQ ID NO: 1916 - protein, 901 aa, Haemophilus influenzae
MSILTRIFGSRNERVLRKLKKQVVKINKMEPAFEALSDDELKAKTQEFRDRLSGGETLQQILPEAFATVREASKRVLGMRHFDVQLIGGVVLTNRCIAEMRTGEGKTLTATLPCYLIALEGKGVHVVTVNDYLARRDAETNRPLFEFLGMSVGVNIPGLSPEEKRAAYAADITYATNSELGFDYLRDNLAHSKEERFQRTLGYALVDEVDSILIDEARTPLIISGQAENSSELYIAVNKLIPSLIKQEKEDTEEYQGEGDFTLDLKSKQAHLTERGQEKVEDWLIAQGLMPEGDSLYSPSRIVLLHHVMAALRAHTLFEKDVDYIVKDGEIVIVDEHTGRTMAGRRWSDGLHQAIEAKEGVDVKSENQTVASISYQNYFRLYERLAGMTGTADTEAFEFQQIYGLETVVIPTNRPMIRDDRTDVMFENEQYKFNAIIEDIKDCVERQQPVLVGTISVEKSEELSKALDKAGIKHNVLNAKFHQQEAEIVAEAGFPSAVTIATNMAGRGTDIILGGNWKAQAAKLENPTQEQIEALKAEWEKNHEIVMKAGGLHIIGTERHESRRIDNQLRGRSGRQGDPGSSRFYLSLEDGLMRIYLNEGKLNLMRKAFTVAGEAMESKMLAKVIASAQAKVEAFHFDGRKNLLEYDDVANDQRHAIYEQRNHLLDNDDISETINAIRHDVFNGVIDQYIPPQSLEEQWDIKGLEERLSQEFGMELPISNWLEEDNNLHEESLRERIVEIAEKEYKEKEALVGEDAMRHFEKGVMLQTLDELWKEHLASMDYLRQGIHLRGYAQKDPKQEYKKESFRMFTEMLDSLKHQVITTLTRVRVRTQEEMEEAERARQEMAARINQNNLPVDENSQTTQNSETEDYSDRRIGRNEPCPCGSGKKYKHCHGSRVARQ

SEQ ID NO: 1917 - DNA, 492 bp, Haemophilus influenzae
gtgtggcacgccagtaatgaacaatcaaagtgcggtgatttttcaccgcacttttttcatacctctacattggatagaaaaatggataaaaaaattatacaagttgctgcggggattattcgtaatgaatttggtcagatctatttaacgcagcgtttagaaggacaggattttgcccaatctttagaatttcccggtggaaaagtagatgcgggagaaaccccagaacaggctttaaaacgtgaactggaagaggaaataggcattgttgcgttaaatgcagaactttatgaacgttttcaatttgaatatccaacaaaaatcatttcttttttcttttatctggtaaatgaatggattggcgaaccttttgggcgagaggggcaagaaggtttttgggttgagcagctcgcattggatgcaggacagtttccccctgcgaatgcaaaattaattcatcgattactaaatgaaactcacaatttcatataa

SEQ ID NO: 1918 - protein, 163 aa, Haemophilus influenzae
MWHASNEQSKCGDFSPHFFHTSTLDRKMDKKIIQVAAGIIRNEFGQIYLTQRLEGQDFAQSLEFPGGKVDAGETPEQALKRELEEEIGIVALNAELYERFQFEYPTKIISFFFYLVNEWIGEPFGREGQEGFWVEQLALDAGQFPPANAKLIHRLLNETHNFI

SEQ ID NO: 1919 - DNA, 1857 bp, Haemophilus influenzae
atgtctcaacttgccaatccagaactgatgaaagtcgttattttactcgcatctagcgtaacaattgtgccgttatttaaaagactcgggttgggtagcgtgctaggttatttagtggcaggttgtttgattggtccatctgtctttggcatagtgcaagatccaacagctgtggtacatttagcggaattaggtgtggtaatgtttctttttattatcgggcttgaaatgtatccagaacgcctttgggcaatgcgtaaagctatttttggcagaggtttgttacaagttggattatgtggttgcttactcactttttcgggtatttatttattaggattaacaaaagaagtatcatttatcgctggtatgggtttcacgctttcctctactgctattgtaatgcaatcactagaagaaagggggcttacttctacgtcaaaaggacaacgcgtaatttcgacattaatttttgaagatattgctattgtaccacttttggcttctgtcgcttttcttgctccccattcgaaagaagcgacaccacatactgattgggtatcaattggtatagcattaagtgctgttgtggggttaattgtgactggaaaatggctaatgaacccactatttcgtttaatttctaaagcacgtattcgtgaaatgatgacagcgggcgcattattggtcgttttaggtgctgcattagcaatggaaattggcggactttcaatggcaatgggcgcgtttgttgctggtgtgatgatgtctgaatcagcgtttcgccatcagcttgaagcggatatagaaccatttcgcggcttattactcggattattttttatgggcgtaggaatgtccttagatttgcatttagtgtttaatcattggatcttgctacttggaattgtttttctttatatacttggaaaagccagtgctgtttatattattgcccgaattacccgtcttgatcatcgagaagccataggacgaatgtctttgatggcacacggtggcgaatttgctttcgttcttttttcagctgcagcaactgcggaagtaatcagtaatgaagaacaagcgacattcactgctgcagtgattatttcgatgcttttttcgcctattattgctcaaattgctcgcaaacttatacagcgtacagagcctaaaaatcttgatcaacttgatgaaaatgatctagacagcatcggggatttggaagataacgttttagttattggttttggacgttttagtcaaattgtctgccaaacattattgattcgtggaattagcgtttcagtgattgatcgcaatatcgaaaatatccgtgctgccgcaaagtttggttttaaagtttattatggcgatggcattcgattagatgttttacgagccgcaggaattgaaaaggcgaaatgtgtcgtattaggtattaacgatacacaaagaattgaacatattgtcagtcaaatgaaagaggcttatccaaatttaccgattttaacccgaacttatgacagaaaaacaacagttagtttgattaagcaggatgtagattttattgtgcgtgaaacttttgaatcagcaattacacttagtcgagcaacattgatgaaattaggtattgataaaattgaagcggaagaaattattaaggaagtacgaacattggatcaagaacggttaaatgaagaagttttacacggtttttcgaatgaaatagtaaaaaaatattggacaccaagaccatttattaaaccgcatcttgatacaaaagcattaaataaagaaacagaagaaattctaagtgagaaaattgaagaagaaatatcaaatgatcattcataa

SEQ ID NO: 1920 - protein, 618 aa, Haemophilus influenzae
MSQLANPELMKVVILLASSVTIVPLFKRLGLGSVLGYLVAGCLIGPSVFGIVQDPTAVVHLAELGVVMFLFIIGLEMYPERLWAMRKAIFGRGLLQVGLCGCLLTFSGIYLLGLTKEVSFIAGMGFTLSSTAIVMQSLEERGLTSTSKGQRVISTLIFEDIAIVPLLASVAFLAPHSKEATPHTDWVSIGIALSAVVGLIVTGKWLMNPLFRLISKARIREMMTAGALLVVLGAALAMEIGGLSMAMGAFVAGVMMSESAFRHQLEADIEPFRGLLLGLFFMGVGMSLDLHLVFNHWILLLGIVFLYILGKASAVYIIARITRLDHREAIGRMSLMAHGGEFAFVLFSAAATAEVISNEEQATFTAAVIISMLFSPIIAQIARKLIQRTEPKNLDQLDENDLDSIGDLEDNVLVIGFGRFSQIVCQTLLIRGISVSVIDRNIENIRAAAKFGFKVYYGDGIRLDVLRAAGIEKAKCVVLGINDTQRIEHIVSQMKEAYPNLPILTRTYDRKTTVSLIKQDVDFIVRETFESAITLSRATLMKLGIDKIEAEEIIKEVRTLDQERLNEEVLHGFSNEIVKKYWTPRPFIKPHLDTKALNKETEEILSEKIEEEISNDHS

SEQ ID NO: 1921 - DNA, 765 bp, Haemophilus influenzae
atgaataataaaattagtgtttatgataaagataatttctttgagctttatcagaaactccgtgtaaatccaattagcctcaatgaaattatcgaaaagcccaccatgctttcattgttgcctaatttaaaagggaagaaattactcgatttaggctgtggtacgggagggcatttacaactttatttagaacgaggggcggctaaagtaattggaactgatctttccgaaaaaatgctcgaacaagctgaaaaagatcttcaaaagtgcggtcaattttcagggcgtttttccttatatcacttaccaatagaaaaattagctgagttaccagaaagtcatttcgatgtgattactagctcttttgcctttcattatattgaaaattttccgacattattatcaacgatccatgacaaactctcgtctaatggcgcattaattttctcacaagaacatccgataactacctgccataaagagggagaacgctgggaaaaaaatgacaaaaaacagcaagtcgcttatcgtttaaatcattatcgagaagaggggaaacgcaatagaaattggttcaaacaaccttttcaaacctatcatcgaacaacagcaacaattatcaataatttaattcatgcaaggtttcaaatcgagcaaatggaagaacccatgcttgctgaccaaccgcaatggcataatgaatttaaagatttgtcgcatcgaccaccattgttatttatcaaagcaagaaaagtggagaaataa

SEQ ID NO: 1922 - protein, 254 aa, Haemophilus influenzae
MNNKISVYDKDNFFELYQKLRVNPISLNEIIEKPTMLSLLPNLKGKKLLDLGCGTGGHLQLYLERGAAKVIGTDLSEKMLEQAEKDLQKCGQFSGRFSLYHLPIEKLAELPESHFDVITSSFAFHYIENFPTLLSTIHDKLSSNGALIFSQEHPITTCHKEGERWEKNDKKQQVAYRLNHYREEGKRNRNWFKQPFQTYHRTTATIINNLIHARFQIEQMEEPMLADQPQWHNEFKDLSHRPPLLFIKARKVEK

SEQ ID NO: 1923 - DNA, 723 bp, Haemophilus influenzae
atggcacaagtttcaatgcgcgatatgatcaacgcaggcgtacacttcggacaccaaactcgttactggaacccacaaatgaaacctttcatttttggtgctcgtaacggtgttcacatcatcaatcttgaaaaaactttacctttattcaacgaagctttagcggaattaactcgcattgctagcaacaacggtaaagtattattcgttggtacaaaacgtgcagcgtctgaagcagttcaagcagcagcattagattgtcagcaatattacgtaaaccaccgttggttaggtggtatgttgactaactggaaaaccgttcgtcaatcaattaaacgtttaaaagatttagaaacccaatctcaagacggtacttttgataaattaaccaaaaaagaagcgttaatgcgtagccgtgagatggaaaaacttgaattaagccttggcggtatcaaagatatgggcggcttaccagatgcgttattcgttatcggtgcagaccacgaacatatcgctgttaaagaagcaaacaacctaggtattcctgtatttgctatcgttgatactaactcaacaccagctggcgtagatttcgttatccctggtaacgatgatgcgactcgtgctatccaactttacgtttctgcagctgcagcagcggttaaagaaggtcgtggtaacgaagctcaagttgctgaagaattagcagctgacgcagaataa

SEQ ID NO: 1924 - protein, 240 aa, Haemophilus influenzae
MAQVSMRDMINAGVHFGHQTRYWNPQMKPFIFGARNGVHIINLEKTLPLFNEALAELTRIASNNGKVLFVGTKRAASEAVQAAALDCQQYYVNHRWLGGMLTNWKTVRQSIKRLKDLETQSQDGTFDKLTKKEALMRSREMEKLELSLGGIKDMGGLPDALFVIGADHEHIAVKEANNLGIPVFAIVDTNSTPAGVDFVIPGNDDATRAIQLYVSAAAAAVKEGRGNEAQVAEELAADAE

SEQ ID NO: 1925 - DNA, 852 bp, Haemophilus influenzae
atggctgaaatcacagcatcattagtaaaagaacttcgtgaccgtactggcgcaggtatgatggaatgtaaaaaagcattagttgaagcaaacggtgatattgagttagcaatcgacaatatgcgtaaatctggtcaagctaaagcagctaaaaaagcaggccgtgttgcagctgaaggtgttatccttgctcgtgtagaaaatggtttcggtgtattagttgaaatgaactgtgaaactgacttcgtagcaaaagatgcaggtttcttaggtttagcaaacgaagtaactgatttcgcagcagcaaacaaaggtaccactatcgaagcattacaagcgcaatttgaagaaaaacgtgctgcattagttgctaaaatcggtgagaacatgaatattcgtcgtgttgcttacttagatggtcaagtaattgcacaatacttacacggtgcaaaaattggcgtattagttgcgggcgaaggttctgctgatgaactgaaaaaagtagcaatgcacgtagctgcatctaaacctgaattcgtgaacccagaagatgtatctgctgaagtggttgaacacgaacgccaaatccaaatcgatattgcgatcaactctggtaaaccaaaagaaatcgcagagaaaatggttgaaggtcgtatgaagaaattcactggtgaagtttcattaacaggtcaagcatttgtaatggatccttctgtatctgtaggggatttcttaaaatcagtaaatacttctgtttctaacttcattcgtttagaagtaggcgaaggtattgagaaaaaagaagaagattttgctgctgaagttgcaaaaatcactggcggtaacgcataa

SEQ ID NO: 1926 - protein, 283 aa, Haemophilus influenzae
MAEITASLVKELRDRTGAGMMECKKALVEANGDIELAIDNMRKSGQAKAAKKAGRVAAEGVILARVENGFGVLVEMNCETDFVAKDAGFLGLANEVTDFAAANKGTTIEALQAQFEEKRAALVAKIGENMNIRRVAYLDGQVIAQYLHGAKIGVLVAGEGSADELKKVAMHVAASKPEFVNPEDVSAEVVEHERQIQIDIAINSGKPKEIAEKMVEGRMKKFTGEVSLTGQAFVMDPSVSVGDFLKSVNTSVSNFIRLEVGEGIEKKEEDFAAEVAKITGGNA

SEQ ID NO: 1927 - DNA, 1026 bp, Haemophilus influenzae
atgcaaaaatcctattctttacaagaattggcaactcaaatcggcgctaccgttcgcggtaacgccgatgttgttgttgagaatatcgcgcctctcgataaagcccaatcaaatcaactcacttttatttctaacgtaaaatttcgtgcattattgaaagattctaaagcagggattttggttgtttctgaagaggatgttgaacactgttctccagaaagcaatttacttattgttaaagatccttatgtggcttacgcaattttagcgcaatatatggatagcacgccaaaagcggcacaaggaatcgcaaaaagtgcggtcatttttgatggtgttttattgggcgaaaatgtatctattggtgcgaacgcagtgattgaagaaggtgttgtactaggtgataacgtgatcattggtgcaaattgctttgttggtaaaaataccaagataggttcaggcactcagctctgggctaatgtcactgtttaccataacgttgagattggagctaattgcttaattcaatcaggaacagttatcggtagtgatggttttggttatgcaaatgatcgtggtcgttggattaaaattccacaagtagggcaagtaataattggtaataacgttgagattggtgcgaatacctgtattgatagaggcgcattagatgccacgattattgaagataacgttattatcgataacctttgtcaaattgcacataatgttcatatcggcactggtacagcggttgcgggtggcgttattatggcaggtagcttaactgttggtcgctattgcttaattggtggtgcaagtgtgattaatggtcatatggaaatttgtgataaagtaaccattactggaatgggaatggttatgcgtccaatcacagaaccgggcgtatattcctctggtattccattgcaaacgaatagagaatggcgtaaaacggcagctctaacattaggcattgatggcatacataaacgcttaaaagcattagaaaagaaaatttcttaa

SEQ ID NO: 1928 - protein, 341 aa, Haemophilus influenzae
MQKSYSLQELATQIGATVRGNADVVVENIAPLDKAQSNQLTFISNVKFRALLKDSKAGILVVSEEDVEHCSPESNLLIVKDPYVAYAILAQYMDSTPKAAQGIAKSAVIFDGVLLGENVSIGANAVIEEGVVLGDNVIIGANCFVGKNTKIGSGTQLWANVTVYHNVEIGANCLIQSGTVIGSDGFGYANDRGRWIKIPQVGQVIIGNNVEIGANTCIDRGALDATIIEDNVIIDNLCQIAHNVHIGTGTAVAGGVIMAGSLTVGRYCLIGGASVINGHMEICDKVTITGMGMVMRPITEPGVYSSGIPLQTNREWRKTAALTLGIDGIHKRLKALEKKIS

SEQ ID NO: 1929 - DNA, 594 bp, Haemophilus influenzae
atgaaaaacatcgcaaaagtaaccgcacttgctttaggtattgcacttgcttcaggctatgcttccgctgaagaaaaaattgctttcattaatgcaggttatatttttcaacatcacccagatcgccaagcggtagcagataaacttgatgctgaatttaaacctgtagctgagaaattagcagcaagcaaaaaagaagttgatgataaaattgctgctgctcgtaaaaaagtagaagcaaaagttgcggctttagaaaaagatgcacctcgcttacgtcaagctgatattcaaaaacgccaacaggaaattaataaattaggtgcggctgaagatgctgaattacaaaaattaatgcaagaacaagataaaaaagttcaagaattccaagctcaaaatgaaaaacgtcaagctgaagaacgtggtaaattattagatagcattcaaactgcgacaaataatttagcaaaagcaaaaggttatacttatgtgcttgatgcaaattcagtcgtatttgcggtagagggtaaagatattactgaagaagtattaaaatctatccctgcttctgaaaaagcacaagagaaaaaataa

SEQ ID NO: 1930 - protein, 197 aa, Haemophilus influenzae
MKNIAKVTALALGIALASGYASAEEKIAFINAGYIFQHHPDRQAVADKLDAEFKPVAEKLAASKKEVDDKIAAARKKVEAKVAALEKDAPRLRQADIQKRQQEINKLGAAEDAELQKLMQEQDKKVQEFQAQNEKRQAEERGKLLDSIQTATNNLAKAKGYTYVLDANSVVFAVEGKDITEEVLKSIPASEKAQEKK

SEQ ID NO: 1931 - DNA, 2394 bp, Haemophilus influenzae
atgaaaaaacttctaatcgcaagtttattattcggtacgacaacgactgtgtttgccgcaccttttgtggcaaaagatattcgtgtggatggtgttcaaggtgacttagaacaacaaatccgagcaagtttacctgttcgtgccggtcagcgtgtgactgacaatgatgtggctaatattgtccgctctttattcgtaagtggtcgattcgatgatgtgaaagcgcatcaagaaggcgatgtgcttgttgttagcgttgtggctaaatcgatcatttcagatgttaaaatcaaaggtaactctgttattcccactgaagcacttaaacaaaacttagatgctaacgggtttaaagttggcgatgttttaattcgagaaaaattaaatgaatttgccaaaagtgtaaaagagcactatgcaagtgtaggtcgctataacgcaacagttgaacctattgtcaatacgctaccaaataatcgcgctgaaattttaattcaaatcaatgaagatgataaagcaaaattggcatcattaactttcaaggggaacgaatctgttagtagcagtacattacaagaacaaatggaattacaacctgattcttggtggaaattatggggaaataaatttgaaggtgcgcaattcgagaaagatttgcagtcaattcgtgattattatttaaataatggctatgccaaagcacaaattactaaaacggatgttcagctaaatgatgaaaaaacaaaagttaatgtaaccattgatgtaaatgaaggtttacagtatgaccttcgtagtgcacgcattataggtaatctgggaggtatgtctgccgagcttgaacctttactttcagcattacatttaaatgatactttccgccgtagtgatattgcagatgtagaaaatgcaattaaagcaaaacttggagaacgcggttacggtagcgcaacggtaaattcagtacctgattttgatgatgcaaataaaacattagcgataacccttgttgttgatgctggacgacgtttaactgttcgccaacttcgctttgaaggaaataccgtttctgctgatagcactttacgtcaggaaatgcgccaacaagaaggaacttggtataattcacaattagttgagttaggaaaaattcgcttagatcgtacaggtttcttcgaaacagtcgaaaaccgaattgatcctatcaatggtagtaatgatgaagtggatgtcgtatataaagtcaaagaacgtaacacgggtagtatcaactttggtattggttacggtacagagagtggtattagttatcaagcaagtgttaaacaagataatttcttgggaacaggggcggcagtaagtatagctggtacgaaaaatgattatggtacgagtgtcaatttgggttataccgagccctattttactaaagatggtgtaagtcttggtggaaatgttttctttgaaaactacgataactctaaaagtgatacatcctctaactataagcgtacgacttacggaagtaatgttactttaggtttccctgtaaatgaaaataactcctattatgtaggattaggtcatacctataataaaattagtaactttgctctagaatataaccgtaatttatatattcaatcaatgaaatttaaaggtaatggcattaaaacaaatgactttgatttttcttttggttggaactataacagccttaatagaggctatttcccaactaaaggggttaaagcaagtcttggtggacgagttactattccaggttctgataacaaatactacaaactaagtgcagatgtacagggtttctacccattagacagagatcacctctgggttgtatctgcaaaagcatctgcaggatatgcaaatggttttggaaacaagcgtttaccgttctatcaaacttatacagcgggtggcatcggttcattacgtggttttgcttatggtagtattggacctaacgcaatttatgccgaatatggtaatggtagtggtactggtacttttaagaagataagttctgatgtgattggtggtaatgcaatcgctacagctagcgcagagttaattgtgccaactccatttgtgagcgataagagccaaaatacggtccgaacctccttatttgttgatgcggcaagtgtttggaatactaaatggaaatcagataaaaatggattagagagcgatgtattaaaaagattgcctgattatggcaaatcaagccgtattcgcgcctctacaggtgtcggattccaatggcaatctcctattgggccattggtattctcttatgccaaaccaattaaaaaatatgaaaatgatgatgtcgaacagttccaatttagtattggaggttctttctaa

SEQ ID NO: 1932 - protein, 797 aa, Haemophilus influenzae
MKKLLIASLLFGTTTTVFAAPFVAKDIRVDGVQGDLEQQIRASLPVRAGQRVTDNDVANIVRSLFVSGRFDDVKAHQEGDVLVVSVVAKSIISDVKIKGNSVIPTEALKQNLDANGFKVGDVLIREKLNEFAKSVKEHYASVGRYNATVEPIVNTLPNNRAEILIQINEDDKAKLASLTFKGNESVSSSTLQEQMELQPDSWWKLWGNKFEGAQFEKDLQSIRDYYLNNGYAKAQITKTDVQLNDEKTKVNVTIDVNEGLQYDLRSARIIGNLGGMSAELEPLLSALHLNDTFRRSDIADVENAIKAKLGERGYGSATVNSVPDFDDANKTLAITLVVDAGRRLTVRQLRFEGNTVSADSTLRQEMRQQEGTWYNSQLVELGKIRLDRTGFFETVENRIDPINGSNDEVDVVYKVKERNTGSINFGIGYGTESGISYQASVKQDNFLGTGAAVSIAGTKNDYGTSVNLGYTEPYFTKDGVSLGGNVFFENYDNSKSDTSSNYKRTTYGSNVTLGFPVNENNSYYVGLGHTYNKISNFALEYNRNLYIQSMKFKGNGIKTNDFDFSFGWNYNSLNRGYFPTKGVKASLGGRVTIPGSDNKYYKLSADVQGFYPLDRDHLWVVSAKASAGYANGFGNKRLPFYQTYTAGGIGSLRGFAYGSIGPNAIYAEYGNGSGTGTFKKISSDVIGGNAIATASAELIVPTPFVSDKSQNTVRTSLFVDAASVWNTKWKSDKNGLESDVLKRLPDYGKSSRIRASTGVGFQWQSPIGPLVFSYAKPIKKYENDDVEQFQFSIGGSF

SEQ ID NO: 1933 - DNA, 1332 bp, Haemophilus influenzae
atgtcatttttgtggtcactaggttcttttatcattgctattgctgtattagtatccgttcacgaatatggtcacttttgggcagcgagaaagtgcggtataaaagtccatcgtttttccattggttttggaaaagtaatttggaaacgcattgacaaatatggtacagaatttgcgatttcaatgattcctttaggcggctatgtaaaaatgcttgatggacgtaatgaagtagttcctgctgagcaaaaatcacaagcatttgacagtaaaagcgtattacaacggtcatttgtaattattgcaggccctttagctaattttatttttgcaatttttgcttattggatcatctacctttatggaatgccaacggttaaaccagtgattgaatcaataacaccaagttccatcgcagcacaagctcacattgaacctaatacacaaattctagcggttgatggcgaagaaactcaagattgggaaaccatcaatatgctacttgcaacaaaaatgggggagcctaatgttgagattagcctttctcctttcaattctaatattgaacaacaacggactttaaatcttacaaattggatattcgatcctgaaaaagaaagtgcttttgaggcattagggattatgcctatgcgtcctaaaattgaaatggtgctttctaaagttgttcaaaattctcccgctgagaaagctagtttacaaatcggtgataaaattttaacagaaaatttaaccgcacttccttggcaagattttataaaacaggtcgaacaaggcacaacttttactataaaaattgaacgtaatggagaaacatttgacaaagtcctaactccagtgcgtaatcaaaatggcaaatggtttgttggggttagcccaaccttgacaaaattagcggatgaataccgtactgaattaaaatatggtattcttgaatctttacaaaaaggcattgaaaaaacaggacagctttcccttttaaccttgaaaatattagggaaattacttactggcgatttgtcattaaataatttaagtgggccaatttctattgcaaaaggtgctggcgcatcagcaaatattggattggtgtattttttaagttttatggcactgattagtgtaaatttagggattatgaatttatttccattaccagtattagatggcggtcatttagtttttttaacaatggaagctgttaaaggaaaacctgtttctgagcgggtgcaaagcatctgttatcgaattggcgcagcactgttattaagcttaacggtgtttgcattatttaatgattttttacgtctataa

SEQ ID NO: 1934 - protein, 443 aa, Haemophilus influenzae
MSFLWSLGSFIIAIAVLVSVHEYGHFWAARKCGIKVHRFSIGFGKVIWKRIDKYGTEFAISMIPLGGYVKMLDGRNEVVPAEQKSQAFDSKSVLQRSFVIIAGPLANFIFAIFAYWIIYLYGMPTVKPVIESITPSSIAAQAHIEPNTQILAVDGEETQDWETINMLLATKMGEPNVEISLSPFNSNIEQQRTLNLTNWIFDPEKESAFEALGIMPMRPKIEMVLSKVVQNSPAEKASLQIGDKILTENLTALPWQDFIKQVEQGTTFTIKIERNGETFDKVLTPVRNQNGKWFVGVSPTLTKLADEYRTELKYGILESLQKGIEKTGQLSLLTLKILGKLLTGDLSLNNLSGPISIAKGAGASANIGLVYFLSFMALISVNLGIMNLFPLPVLDGGHLVFLTMEAVKGKPVSERVQSICYRIGAALLLSLTVFALFNDFLRL

SEQ ID NO: 1935 - DNA, 867 bp, Haemophilus influenzae
atgcttaaacaacgagttttatctgctattgtgttaattgctgcatttttatgtgcgctatttttattcacgcctttttattttgccctcgctttaggggcagtagcgattttaggcatttgggaatggactcaatttgctcgcctaaaacaacctttgatacgtttttttgtgactacctttttaggcgtatttatcttcttatggctctatactgagggcaactatttagatgcagggcatgtgtttgaacaacatcttcagcttttattgataaatgctgttagctggtggggtttagctttgttacttgtgatcagttatcctaaatcagctaaattttggtctaaaaatccacttttacaacttttatttgccttttctacgttgattccatttgtcgcaggtgtattacgtttacgtttagaacactatacccatgatccttatcacggcttatttttattactttacgtatttatacttgtttgggcggctgattctggtgcttattttagcggacgtgcctttggcaaacgtaaacttgcccctaaagtatcgccaggtaaaagttgggaaggggtcattggtggcttaattacagcattagtgcttgcttttatctttattcatttctctaacaatactttagtaggcgatcgaaatattactggatttatcattctttctgtagcgacagttgcaatttcagtattgggcgatttaactgaaagtatgtttaaacgtgagtcaggagttaaagacagtagccaattgattcctggtcatggcggtgtgttagatcgcattgatagcttgactgccgcagtaccttttttcagctatttctatttctttgtcttataa

SEQ ID NO: 1936 - protein, 288 aa, Haemophilus influenzae
MLKQRVLSAIVLIAAFLCALFLFTPFYFALALGAVAILGIWEWTQFARLKQPLIRFFVTTFLGVFIFLWLYTEGNYLDAGHVFEQHLQLLLINAVSWWGLALLLVISYPKSAKFWSKNPLLQLLFAFSTLIPFVAGVLRLRLEHYTHDPYHGLFLLLYVFILVWAADSGAYFSGRAFGKRKLAPKVSPGKSWEGVIGGLITALVLAFIFIHFSNNTLVGDRNITGFIILSVATVAISVLGDLTESMFKRESGVKDSSQLIPGHGGVLDRIDSLTAAVPFFSYFYFFVL

SEQ ID NO: 1937 - DNA, 633 bp, Haemophilus influenzae
atgcgaattttcggacacaccaatggcgttactgcggtacgcaaagcagtggcttatgcacgacaaatcggtgtggaagtactcacactttatgcctttagtagcgaaaattggagtcgcccagaacaagaaatcagtgcgttaatgtcgctttttatgcaagccttggatcgcgaagtgaaaaaattacataaaaataatatttgtctgaaaattataggcgatgtatctcgttttagtgaaactttacaagaaaaaatcaaaaaagcggaaaatttaacagaaaaaaataccgcacttacactcaatattgcggcaaattacggcggttgttgggatattattcaagccgctaaacaaattgcagaaaaagttaaaaaagaagaaatgtcagtttcagatattaataactcgacttttcaacatcatcttgcaacccaaaatgcaccacctgtggatttattaattcgcaccagtggagaacagcgcataagcaactttttattatggcaaattgcctatgcggaattatatttttccgatgtgctttggcctgattttaatcaattagaatttaatcgcgcgattgcaagttatcaacaacgtcatcgccgttttggcgggactgaatag

SEQ ID NO: 1938 - protein, 210 aa, Haemophilus influenzae
MRIFGHTNGVTAVRKAVAYARQIGVEVLTLYAFSSENWSRPEQEISALMSLFMQALDREVKKLHKNNICLKIIGDVSRFSETLQEKIKKAENLTEKNTALTLNIAANYGGCWDIIQAAKQIAEKVKKEEMSVSDINNSTFQHHLATQNAPPVDLLIRTSGEQRISNFLLWQIAYAELYFSDVLWPDFNQLEFNRAIASYQQRHRRFGGTE

SEQ ID NO: 1939 - DNA, 2586 bp, Haemophilus influenzae
atgcaagaacaatatcgccccgatatgatcgaaccaaaggttcaacaatattgggcagaaaataaagttttcaaagcaatcaaagacgaatctaaagaaaaatattactgtctttctatgttcccatatccttctggccgcctgcatatgggacatgtacgtaactatactattggtgatgtcatttctcgttatcaacgcatgctaggcaaaaacgtattacaaccctttggttgggatgctttcggcttaccagcagaaggtgccgcaatcaaaaacaaaactgcgcctgctaaatggacgtacgaaaacattgcctacatgaaaaaacaacttcagcttttaggctttggtttcgactgggatcgtgaaatcgcaacctgtaaaccagaatactacaaatgggaacaatggttcttcactgagctttacaaaaaaggcttagtgtacaaaaaaacctcaaccgtaaactggtgcccgaatgatgaaacagtgctcgcaaacgagcaagtacacgaaggttgttgctggcgttgtgatacacctgtggaacaaaaagaaatcccacaatggtttatcaaaattactgactatgcagagcaattattaggtggtttagatgcccttccacaatggcctgacatggtaaaaaccatgcaacgtaactggattggtcgttctgaaggggtagaaattacctttgatgttgcaaataccaacgaaaaagtggcggtttacaccacgcgtccagataccttttacggcgtgagttatttaggcattgctgcagcacatccattagcaagtttagcggctcaaaataatcctgaattagccgcctttatccaagaagcgaaaaacgccaaagtggcagaagctgatcttgcgacaatggagaaaaaaggaatggcaacgggcttatttgctattcatccattgacgggcgaaaaattaccgatttgggtcgctaatttcgtgttaatgcactatggcacaggggctgtcatggctgttccagctcacgaccaacgtgactttgaatttgctcaaaaatatagtttgccaattaaacaagtgatcgcaccgcttgcaaatgaagaaattgatttaaccaaacaagctttcgttgaacacggtaaattagtgaactcagctgaatttgatggtaaagactttgatggtgctttcaacggcattgcagataaattagaaaaattaggtgttggaaaacgtcaagttaattaccgtttacgtgactggggcgtttctcgccaacgttattggggtgcaccaattccgatgctaacccttgaaaatggcgatgtagtacctgcaccgttagaagatttacctattattctgcctgaagatgtggtaatggatggtgtaaaaagtccaattaaagctgaccctaattgggcaaaaacaacccttaacggcacaccagcgtcaaaagaaacggatacctttgatacctttatggaatcctcttggtattacgcgcgctacacttgtccacaatatcaaaatggcatgcttgatgcggaagaagcaaactattggttaccagtggatcaatatatcggtggtattgaacacgcaacaatgcacttgctctacttccgcttcttccacaaattattgcgtgatgcaggatttgtaaccagtgacgaaccagccgataaattattatgtcaaggtatggtgcttgcagatgcgttctactacacaagtccaaccaatgagcgtatttgggtaagtccaacacaggtgactcttgaacgtgatgaaaaaggcagaattattaaagcgaccgatcctgaagggcgtgaattagtccacagtggcatgaccaaaatgtcgaaatccaaaaataacggtattgacccacaagaaatggtagaaaaatatggtgccgatactgttcgtctatttatgatgtttgcctctccagcagaaatgaccttggaatggcaagaatctggcgtagaaggggcgaaacgtttcttagggcgtgtttggaatttggtatatcaatatcaacaaaatccagcaaaaactagcctagatttgaccgcactttccgcagaacaaaaagtgcttcgtcgtgaagtgcataaaaccattgcgaaagtgagcgatgatattggtcgtcgtcaaacatttaatactgcgattgctgcagtgatggaattgatgaataaactgactaaggcatcgcttgatagcgagcaagatcgtgcagttatggcggaggcattaagtgcagttgttcgtatgctttatccaattacgccacatatctgttttgaattatggcaagctcttggcaatgaaagtgctattgatactgcagaatgggtaaaagccgatgaagccgcaatggtagaagatgaaaaactgattgttgtgcaagtaaatggcaaggttcgtggcaaagttactgttgcggcagatgcagatgaagacacagtcaaaacgattgcttttgcggatgaaaatgtgaagaaatttattgataatcaacacattgtcaaagtgatttatgtcgtaggtaaattattaaacgtggtagtgaaaccataa

SEQ ID NO: 1940 - protein, 861 aa, Haemophilus influenzae
MQEQYRPDMIEPKVQQYWAENKVFKAIKDESKEKYYCLSMFPYPSGRLHMGHVRNYTIGDVISRYQRMLGKNVLQPFGWDAFGLPAEGAAIKNKTAPAKWTYENIAYMKKQLQLLGFGFDWDREIATCKPEYYKWEQWFFTELYKKGLVYKKTSTVNWCPNDETVLANEQVHEGCCWRCDTPVEQKEIPQWFIKITDYAEQLLGGLDALPQWPDMVKTMQRNWIGRSEGVEITFDVANTNEKVAVYTTRPDTFYGVSYLGIAAAHPLASLAAQNNPELAAFIQEAKNAKVAEADLATMEKKGMATGLFAIHPLTGEKLPIWVANFVLMHYGTGAVMAVPAHDQRDFEFAQKYSLPIKQVIAPLANEEIDLTKQAFVEHGKLVNSAEFDGKDFDGAFNGIADKLEKLGVGKRQVNYRLRDWGVSRQRYWGAPIPMLTLENGDVVPAPLEDLPIILPEDVVMDGVKSPIKADPNWAKTTLNGTPASKETDTFDTFMESSWYYARYTCPQYQNGMLDAEEANYWLPVDQYIGGIEHATMHLLYFRFFHKLLRDAGFVTSDEPADKLLCQGMVLADAFYYTSPTNERIWVSPTQVTLERDEKGRIIKATDPEGRELVHSGMTKMSKSKNNGIDPQEMVEKYGADTVRLFMMFASPAEMTLEWQESGVEGAKRFLGRVWNLVYQYQQNPAKTSLDLTALSAEQKVLRREVHKTIAKVSDDIGRRQTFNTAIAAVMELMNKLTKASLDSEQDRAVMAEALSAVVRMLYPITPHICFELWQALGNESAIDTAEWVKADEAAMVEDEKLIVVQVNGKVRGKVTVAADADEDTVKTIAFADENVKKFIDNQHIVKVIYVVGKLLNVVVKP

SEQ ID NO: 1941 - DNA, 504 bp, Haemophilus influenzae
atgatcaactcaatcaagactttactgcttaccgcaacattagcaattctttctgcttgcggttggcattttcaacagtcggttactatgccaaatgaatggcgaacattagcccttgaaagtgatgactcttataatgattttactgttattatgcgtcgcaaattgcaggaaaatcaggttaatgtcgtcaatttagaacaaaatattcctattttacgtattaataaacagattacttcagatcaagttgcgtctatttttaagcacggacgtgaggcagaaaaacttttaatgttggaagtagaagccactttccgccttgctaatggcgaaagctatccaatcaatgcgaaagtaaaccgtactttctttgataatgcacgtgcagcattagccaaatcagaagaacgagaggtaatttggaatgatatgcgcgagcaagtagcgcgtcaattaatcgtaaaaataattgcgttacaaaatcaaataaaaaggaaataa

SEQ ID NO: 1942 - protein, 167 aa, Haemophilus influenzae
MINSIKTLLLTATLAILSACGWHFQQSVTMPNEWRTLALESDDSYNDFTVIMRRKLQENQVNVVNLEQNIPILRINKQITSDQVASIFKHGREAEKLLMLEVEATFRLANGESYPINAKVNRTFFDNARAALAKSEEREVIWNDMREQVARQLIVKIIALQNQIKRK

SEQ ID NO: 1943 - DNA, 1035 bp, Haemophilus influenzae
atgaaccgcatttttccagagcaactaaatcatcatcttgcgcaaggcttggctagagtttatctcttgcaagggcaagatcctttattacttagtgaaactgaggatacactttgtcaagtggcaaaccagcaaggttttgatgaaaaaaatactattcagattgatagccaaactgattgggcacaacttatagaatcttgtcaatctataggattgttttttagtaaacaaatactaagcttgaatttacctgaaaatttcaccgcacttttgcagaaaaatctgcaagaacttatatccgtattgcataaagatgtcttgcttattttacaggtagcaaaattggctaaagggattgaaaagcaaacgtggtttattacacttaatcaatatgaaccaaatacaatactgataaattgtcaaacaccgacggtagaaaacttaccacgttgggtaaaaaatcgtaccaaagcaatggggttagacgctgacaatgaagcaattcaacaactttgttatagttatgaaaacaatctgctcgcactcaaacaagctctgcagcttttagatttgctctatcctgaccataaacttaactacaatcgtgttattagcgtggtggaacaatcctcaatttttacaccatttcaatggattgatgcgttgcttgttggaaaggcaaatcgtgctaaacgtattttaaaaggtttacaagctgaagatgtgcaacctgttattttattacgcacactacagcgagaattatttacgttgcttgaactcacaaaaccacagcaacgtattgtgacaacggaaaaacttccaactcaacaaattaagactgaatttgatcgtctaaaaatctggcaaaatcgccgaccgctctttttaagtgcgattcaccgtttaacttaccagactctctacaaaattatccaagaactcgctaatattgaacgtctaactaaacaagaatttagtgatgaagtatggattaaactcgctgatttatctgtaaaaatttgtttgtag

SEQ ID NO: 1944 - protein, 344 aa, Haemophilus influenzae
MNRIFPEQLNHHLAQGLARVYLLQGQDPLLLSETEDTLCQVANQQGFDEKNTIQIDSQTDWAQLIESCQSIGLFFSKQILSLNLPENFTALLQKNLQELISVLHKDVLLILQVAKLAKGIEKQTWFITLNQYEPNTILINCQTPTVENLPRWVKNRTKAMGLDADNEAIQQLCYSYENNLLALKQALQLLDLLYPDHKLNYNRVISVVEQSSIFTPFQWIDALLVGKANRAKRILKGLQAEDVQPVILLRTLQRELFTLLELTKPQQRIVTTEKLPTQQIKTEFDRLKIWQNRRPLFLSAIHRLTYQTLYKIIQELANIERLTKQEFSDEVWIKLADLSVKICL

SEQ ID NO: 1945 - DNA, 138 bp, Haemophilus influenzae
gtggattgccccgaatcgaacaactgggataaaaccgaaaaagaaaccttgcaggaaaaaggcattaagccgatgacgaatgaagaacgattagcacagttaaaagggcaagataaagtgcaagtcaagttgttttaa

SEQ ID NO: 1946 - protein, 45 aa, Haemophilus influenzae
MDCPESNNWDKTEKETLQEKGIKPMTNEERLAQLKGQDKVQVKLF

SEQ ID NO: 1947 - DNA, 291 bp, Haemophilus influenzae
atgacttataaactcatttttgataaacgtgcattaaaagaatggaataagttaggagaaactttacgccagcaatttaaaaataaattagccgaaagaatgataaatccacgcattcaagccgataaattaaagggcgaaaatgatttatataaaataaaattaagaagcgcaggctatcgattagtttatcaagtaagagatcaggaaatcaccattattgttgtatctattggaaaaagggaacgattagaagtctataaaaccgcagaacaaagaacagcccactaa

SEQ ID NO: 1948 - protein, 96 aa, Haemophilus influenzae
MTYKLIFDKRALKEWNKLGETLRQQFKNKLAERMINPRIQADKLKGENDLYKIKLRSAGYRLVYQVRDQEITIIVVSIGKRERLEVYKTAEQRTAH

SEQ ID NO: 1949 - DNA, 255 bp, Haemophilus influenzae
atggcattacatcaaatactggcagaacaagcggcaagcattacagacttaaaacgaaacccaatgggcgtaattcaagaaagcgaaagcggaatagtcgcaatattgaaccgaaaccaacccgcattttattgcatcaccccagaattattctctcatatgcaagaattaatcgaagatttagaactcagcagaatggcaaatgaacggcttgccactcttgaacctgtagaggttgatctaaatgacttataa

SEQ ID NO: 1950 - protein, 84 aa, Haemophilus influenzae
MALHQILAEQAASITDLKRNPMGVIQESESGIVAILNRNQPAFYCITPELFSHMQELIEDLELSRMANERLATLEPVEVDLNDL

SEQ ID NO: 1951 - DNA, 225 bp, Haemophilus influenzae
atggaacagataccccctgaagaatgcacaagtaaattgtttgaagccgtgcatttatttatcaattacagcgtgcaagattatatttcacgtggaatcatacaggcgaatgaaaagcctcgatttatgcgtgaattatgggggcagcttgaacaaagtgcgttagaaaacaaccgcactttcaacaataaagccgccgcatccgcttgttttacgtttgaatag

SEQ ID NO: 1952 - protein, 74 aa, Haemophilus influenzae
MEQIPPEECTSKLFEAVHLFINYSVQDYISRGIIQANEKPRFMRELWGQLEQSALENNRTFNNKAAASACFTFE

SEQ ID NO: 1953 - DNA, 252 bp, Haemophilus influenzae
gtgctaatcaccgcacaaaacctgattggcggactccgtgcaatttccgcgcctttctttccggcagactgcattttaattacaacgctttctaaccttgcgatttacttcaagcaaaacaccgctcgcttgttcttcaaacaagaaccgagacaaaataacgtgcaaatttatttctctgtgatgcttgattacttgctagaaaatcaccgctatgcggtgctaattgaaagcattgatgaggtgcaataa

SEQ ID NO: 1954 - protein, 83 aa, Haemophilus influenzae
MLITAQNLIGGLRAISAPFFPADCILITTLSNLAIYFKQNTARLFFKQEPRQNNVQIYFSVMLDYLLENHRYAVLIESIDEVQ

SEQ ID NO: 1955 - DNA, 2067 bp, Haemophilus influenzae
atgacaacccaaaacttccttgtagaaatcggcacggaagagctgccaccaaaagctctcaaaacattagcgacctcttttgcggataacgttgaggcggaattaaaccaagcaggtttaaccttcgacaaaatcgaatggtttgcggcgccacgtcgtttggcggtgaaggtgttgaacttggcgacacaacaaccgagcaaagaaatggaaaaacgagggcctgcagtgtcagcagcctttgatgcggaaggtaaaccaactaaagcggcagaaggctgggcgcgtggttgtggtattaccgttgagcaagcagaacgcattgcaactgataaaggcgaatggctcattcaccgtgcaaaaattgaaggtcagccgaccaaaaacttacttaacgacattgtggctaatgcgttggcgaaattgccaattccaaaaccaatgcgttgggcagataaaaccgtgcaatttatccgtccagttcacactgtgactatgttgttaggtgatgagttaatcgaaggcgaaattttaggtgtggcaagtgctcgcaccattcgcggccaccgtttcttaggcgagaaagaatttgacattcaacatgcagaccaatatccgcaattattgcgtgaaaaaggttctgtggtagcagacttcaatgaacgtaaagcagaaattcttgcaaaatctcaagcaaaagcgaccgcacttggtggcgtggctgacattgaagaaagtctgcttgaagaagtcacttccttggtggaatatccaaacgtcttagcagcaaaatttgaagaacgtttcttagaagtgcctgcggaagccttggtttacaccatgaaaggcgaccaaaaatatttcccaatttatgacaaagacggcaaattattaccgcactttattttcgtatcgaacatcaacccagaagatccaaccgcgattatcgaagggaacgaaaaagtggttcgcccacgtttaaccgatgcggaattcttcttcaaaaccgacttaaaacaaaaactggtcgatcgtttaccacgcttagaaaccgtgttattccaacaacaacttggtacattaaaagacaaaactgaccgcattgaacaacttgcaggcgaaattgcaaaacaaatcggtgcagatgaagcgaaagcaaaacgtgcagggttactttcaaaatgtgacttaatgaccaacatggtattcgaattcactgatacgcaaggcgtaatgggtatgcactacgctcgtcacgacggtgaagatgaagaagtggcagtggcgttaaacgaacaatatatgccacgctttgcgggtgatgaattacctaagtctttggtggcaagtgcggtcgctttagcggataaatttgacactttgacgggtatcttcggcatcggccaagcaccaaaaggcagtgcagacccatttgcattacgtcgtgcggcattaggtgcgttacgtattatcgtagagaaaaacttaccacttgatttagaagatttagtgaaaaaatcagccgcacttttcggtgataaactcacgaatcaaaatgtggttgctgatgtggtggacttcatgctcggccgtttccgtgcatggtatcaagatgaaggcattgaggtggatgtaattcaagcggtattagcacgtcgtccaactcgccctgctgactttgatgcgcgagtgcgtgcggtttcacatttccgtactttagattcagcggaagcgttagcagcagcaaataaacgtgtaagtaacatcttagcgaaagcagatgctgcaattggcgagatcaatttaaccgtttgcgtagagcaagcagaaaaagctcttgctgaagcggtgcttgcattacgcactgaagtacaaccgcttatcgcacaaggcgattacacgacagtattggataaattagcaaacttacgtgcgccagtagacagtttctttgataacgtgatggtaaatgctgaagatccagcactacgccaaaaccgattagcgattttaaatacgttacaagggttattcttacaagtagctgatatttcagtgcttcaataa

SEQ ID NO: 1956 - protein, 688 aa, Haemophilus influenzae
MTTQNFLVEIGTEELPPKALKTLATSFADNVEAELNQAGLTFDKIEWFAAPRRLAVKVLNLATQQPSKEMEKRGPAVSAAFDAEGKPTKAAEGWARGCGITVEQAERIATDKGEWLIHRAKIEGQPTKNLLNDIVANALAKLPIPKPMRWADKTVQFIRPVHTVTMLLGDELIEGEILGVASARTIRGHRFLGEKEFDIQHADQYPQLLREKGSVVADFNERKAEILAKSQAKATALGGVADIEESLLEEVTSLVEYPNVLAAKFEERFLEVPAEALVYTMKGDQKYFPIYDKDGKLLPHFIFVSNINPEDPTAIIEGNEKVVRPRLTDAEFFFKTDLKQKLVDRLPRLETVLFQQQLGTLKDKTDRIEQLAGEIAKQIGADEAKAKRAGLLSKCDLMTNMVFEFTDTQGVMGMHYARHDGEDEEVAVALNEQYMPRFAGDELPKSLVASAVALADKFDTLTGIFGIGQAPKGSADPFALRRAALGALRIIVEKNLPLDLEDLVKKSAALFGDKLTNQNVVADVVDFMLGRFRAWYQDEGIEVDVIQAVLARRPTRPADFDARVRAVSHFRTLDSAEALAAANKRVSNILAKADAAIGEINLTVCVEQAEKALAEAVLALRTEVQPLIAQGDYTTVLDKLANLRAPVDSFFDNVMVNAEDPALRQNRLAILNTLQGLFLQVADISVLQ

SEQ ID NO: 1957 - DNA, 366 bp, Haemophilus influenzae
atgcaaccctatgaaaaatacctaaaagagaattcgcaaaaattgcgagcggatcaaacggatgcagaaagaaaactatggcaacgcatcaatcgagatcaattattaggatttcgatttaatcgacaaaagccacttttaagttatatcgttgatttttattgtgcgaaagcaaagctgattatcgaattagacggtagtcagcactatgaacctgattatcaggaaaaagatgcattacgagatgcagaattaaattcacttggttttacagtgatgcggtttagcaatgatgaagttatgcgtgaaattgaagcggtagtagagcagatttatttgtttttagagaatgtaagggctgattga

SEQ ID NO: 1958 - protein, 121 aa, Haemophilus influenzae
MQPYEKYLKENSQKLRADQTDAERKLWQRINRDQLLGFRFNRQKPLLSYIVDFYCAKAKLIIELDGSQHYEPDYQEKDALRDAELNSLGFTVMRFSNDEVMREIEAVVEQIYLFLENVRAD

SEQ ID NO: 1959 - DNA, 261 bp, Haemophilus influenzae
atgagcaaacccattcttttttatgcagaaacatgcccagataccgcgccatttgtcgcggagttggatcgcttaggtgtggattacgatgaagtagaaattatgacttcattacctaatctcaagcaattcattcgtttacgcgatagcagtgcagaatttgataactcgaaagcaaatggctatttaggcattcctgcgttgttattaccaaatggcgatgttgttttagacccatcaaagttaaaagtaattttttaa

SEQ ID NO: 1960 - protein, 86 aa, Haemophilus influenzae
MSKPILFYAETCPDTAPFVAELDRLGVDYDEVEIMTSLPNLKQFIRLRDSSAEFDNSKANGYLGIPALLLPNGDVVLDPSKLKVIF

SEQ ID NO: 1961 - DNA, 873 bp, Haemophilus influenzae
atgattttagccctgcaagaatattgggcaaaccaaggctgcaccattgtgcaaccttttgatatggaagtgggcgcaggtacttctcacccaatgaccgcattgcgcgcattaggcccagagccaatggcatttgcttatgttcaaccttcacgccgcccaacggacggtcgctacggtgaaaacccaaaccgtttacaacactactatcaattccaagtagtaatcaaaccttctccagataacattcaagaactttatttaggatcgcttgaaatgctcggcttcgatccgaccaaaaacgatattcgtttcgtagaagataactgggaaaacccaaccttaggtgcatggggcttaggttgggaagtatggctaaacggtatggaagtaacccagtttacctatttccaacaagtgggcggcttagaatgtaaacctgtaacgggcgaagtgacctacggtttagagcgtttagccatgtacattcaaggcgtagattctgtatatgacttagtttggtctgacggtccattaggcaaaaccacttatggcgatgttttccatcaaaatgaagttgagcaatcaacctataactttgaacacgcaaacaccgatttcttattctactgcttcgatcaatacgaaaaagaagcacaagagttattagccttagaaaaaccgttaccattaccggcttatgagcgcattttaaaagccgcacacagctttaacttattagatgcgcgtaaagcaatttcggtcaccgaacgccaacgctatattttacgcattcgtgccttaaccaaaggcgtggcggaagcctattatgcaagccgtgaagccttaggtttcccaggttgtaaaaaataa

SEQ ID NO: 1962 - protein, 290 aa, Haemophilus influenzae
MILALQEYWANQGCTIVQPFDMEVGAGTSHPMTALRALGPEPMAFAYVQPSRRPTDGRYGENPNRLQHYYQFQVVIKPSPDNIQELYLGSLEMLGFDPTKNDIRFVEDNWENPTLGAWGLGWEVWLNGMEVTQFTYFQQVGGLECKPVTGEVTYGLERLAMYIQGVDSVYDLVWSDGPLGKTTYGDVFHQNEVEQSTYNFEHANTDFLFYCFDQYEKEAQELLALEKPLPLPAYERILKAAHSFNLLDARKAISVTERQRYILRIRALTKGVAEAYYASREALGFPGCKK

SEQ ID NO: 1963 - DNA, 1527 bp, Haemophilus influenzae
atgagttctcaatgccctttctcgcacttagctgcgacaaacttaacaatgggtaacggtgcacccgttgctgataaccaaaacagcttaacagctggtccacgtggtccattacttgcacaagatttatggcttaacgaaaaattagctgatttcgtacgtgaagtgatcccagagcgtcgtatgcacgctaaaggttctggtgcatttggtacttttactgtcacacacgatattactaaatatactcgtgcaaaaatttttagtgaagtgggtaaaaaaacggaaatgttcgcacgttttactaccgtggcaggcgaacgtggtgcagcagatgctgagcgtgatattcgtggttttgcattaaaattctatactgaagaaggtaactgggatttagtaggtaacaatacgccagtattcttcttacgtgatccacgtaaattcccagatttaaataaagcagtaaaacgtgatccgcgtactaatatgcgttcagcaactaataactgggatttctggacattattaccagaagcattacaccaagtcactgttgtaatgagtgatcgtggtattccagcaagttatcgtcatatgcacggtttcggttctcacacttatagtttctggaacgaagcgggcgaacgtttttgggtaaaattccacttccgtactcaacaaggcattaaaaatttaacagatgctgaagcagcagaaattattgcaaatgaccgtgaaagccatcaacgtgatttatatgaagcgattgaacgtggcgatttccctaaatggacattatttgtacaaattatgccggaagcagatgcggaaaaagtgccttatcacccattcgacttaactaaagtatggccgaaaaaagactatccattaattgaagtcggcgagtttgaattaaaccgtaacccagaaaacttcttcgctgatgtagaacaatctgcatttgcaccaagtaacttggttccgggtattggcgcaagccctgacagaatgttacaagcccgtttatttaactatgcggatgcacaacgttaccgtttaggtgtgaactaccgtcaaattccagtaaaccgtccacgttgccctgttcatagcaaccaacgtgatggtcaaggtcgtgtagatggtaactacggtagcttgccacactacgagccaaacagcttcagccaatggcaacaacaaccagactttgctgaaccaccacttcgtatcaacggagatgcagcacactgggattatcgtaacgatgataacgattacttcagccaacctcgtgcattatttaacttaatgaatgcagagcaaaaacaatcattattcaacaacacggcagcagcaatgggcgatgcacctgatttcatcaaatatcgtcatattcgtaactgccactggtgtgatgccgcatacggtgaaggcgttgcgaaagcattaggtttaaccgttgaagatgcattaaaagctcgtgatactgatcctgcattaggtcaaggtggattgttataa

SEQ ID NO: 1964 - protein, 508 aa, Haemophilus influenzae
MSSQCPFSHLAATNLTMGNGAPVADNQNSLTAGPRGPLLAQDLWLNEKLADFVREVIPERRMHAKGSGAFGTFTVTHDITKYTRAKIFSEVGKKTEMFARFTTVAGERGAADAERDIRGFALKFYTEEGNWDLVGNNTPVFFLRDPRKFPDLNKAVKRDPRTNMRSATNNWDFWTLLPEALHQVTVVMSDRGIPASYRHMHGFGSHTYSFWNEAGERFWVKFHFRTQQGIKNLTDAEAAEIIANDRESHQRDLYEAIERGDFPKWTLFVQIMPEADAEKVPYHPFDLTKVWPKKDYPLIEVGEFELNRNPENFFADVEQSAFAPSNLVPGIGASPDRMLQARLFNYADAQRYRLGVNYRQIPVNRPRCPVHSNQRDGQGRVDGNYGSLPHYEPNSFSQWQQQPDFAEPPLRINGDAAHWDYRNDDNDYFSQPRALFNLMNAEQKQSLFNNTAAAMGDAPDFIKYRHIRNCHWCDAAYGEGVAKALGLTVEDALKARDTDPALGQGGLL

SEQ ID NO: 1965 - DNA, 1182 bp, Haemophilus influenzae
atgaaacgtgtaacagggtttcctactcgaccagatatggtgcaacagctacttaatgttggatttgattactataatttgccttccagtgatggatctcattattggtctgataatgtcgcctatgaatttaccttagcggaaattgatcgcattgaggatacaactaatgaattgcattcaatgtgtttagattttgcggcggatgaaattaaaaaaggcgattatgaaaattatcgttttacggagttgcaaaaacagcttattgaaacctcttggcgtaatcaagatccttatttatatggacgctttgattttggctatgatggcgacaacctaaaaatgtttgaatataacgccgatacaccaacatctttgttggaggcagcggttgtccaatggcagtggttggagcaaattgagggtttgaaacatcgtgatcaatttaactggattcatgaagaattaataaaacatttccaatttttgaaacaacaaagtggcaaaacagatttccatttgagtgccatgcaggatgctggccgtgaagattggggtaatttggattatttagctgatgtggcttataacgcgggttggaatattcatcaattagcggtggaagatattggctataacagtgaaacaaaaaaatttgtagatttaaatgatcagcctattgaaatgttatttaaattgtatccactagaatggctaagccacgctgagtttgctcgccatattacaacggctgaaacacgatttattgaaccagcgtggaaaatgttgttaagtaataaagcactattggcaaaactttgggcgcgttatcctaatcatccgcatttattgcctgcttattttacgcctttcgaactaccaaaagatttatcgatgtgggtgaaaaaaccattgttaggtcgagaaggtgccaatgttttctattatgagaaaaataatggtgtagaatttgcagcgaaaggaagcgaacactctgcattttatgctaattcaggttatgtttatcaacaaaaatttgaattaccgagttttgatggaatgtatccaattattggctcttgggttgtgggggatgtggcttgcggtatgggattacgcgaagattttactgcagtgacgggtaatgatagccattttatacctcattattttgtgccatga

SEQ ID NO: 1966 - protein, 393 aa, Haemophilus influenzae
MKRVTGFPTRPDMVQQLLNVGFDYYNLPSSDGSHYWSDNVAYEFTLAEIDRIEDTTNELHSMCLDFAADEIKKGDYENYRFTELQKQLIETSWRNQDPYLYGRFDFGYDGDNLKMFEYNADTPTSLLEAAVVQWQWLEQIEGLKHRDQFNWIHEELIKHFQFLKQQSGKTDFHLSAMQDAGREDWGNLDYLADVAYNAGWNIHQLAVEDIGYNSETKKFVDLNDQPIEMLFKLYPLEWLSHAEFARHITTAETRFIEPAWKMLLSNKALLAKLWARYPNHPHLLPAYFTPFELPKDLSMWVKKPLLGREGANVFYYEKNNGVEFAAKGSEHSAFYANSGYVYQQKFELPSFDGMYPIIGSWVVGDVACGMGLREDFTAVTGNDSHFIPHYFVP

SEQ ID NO: 1967 - DNA, 582 bp, Haemophilus influenzae
atgaaaaagaaaaatcagattttagttagtttatctattgtagccttattaggaggctgttcagaagagcaagtacaacgtgatgtgtatcagtctttagacgattgtttagcggattggaaaaaaattgagctttgtgaagcagataaaaatactgaaagtactcagaaaactgaaactacaccacaacaggggcttggtttaaatattcgtgataatggtaatgcagaaagtgcggtaaaaaatccagctgaaaataatgcacaagctaatcaaagcgataacagtgctgaatcaactgcaaaagctgaaagtaccgatccttctttaggagccgcaattgctggtggcgttatagggtatatggcggctcgtgcaattagtagtttccttggcccaagctatcatcctggaaatcgagctgtcaccacaccaacagggcaagttgtgcaacctcaaacgaatcgttctgttggaaaaccaatgctcgtgaaaggaaatgcaggaagcatgaatagcaaacctgtatctcgtggtggttttagtagcccaaataatactcatcgtagcagtgggggctaa

SEQ ID NO: 1968 - protein, 193 aa, Haemophilus influenzae
MKKKNQILVSLSIVALLGGCSEEQVQRDVYQSLDDCLADWKKIELCEADKNTESTQKTETTPQQGLGLNIRDNGNAESAVKNPAENNAQANQSDNSAESTAKAESTDPSLGAAIAGGVIGYMAARAISSFLGPSYHPGNRAVTTPTGQVVQPQTNRSVGKPMLVKGNAGSMNSKPVSRGGFSSPNNTHRSSGG

SEQ ID NO: 1969 - DNA, 420 bp, Haemophilus influenzae
atgttacatttaactttagaagacgaactctttttgggaacgccaaagcaagtgggaacacattcgacagtatttgagcattttgctgtaatgtttgaagatgacggggaaactggctatttttatgcgcttgatatgcgtcaaaatgctcaaccgatagtggatatgttgcacgtgtataatgttgattcaacctctaatcatcatgaagcacgcaaacttaaaatttgttgggatgagagtggttatttagccttgttgcttattaatggctatcctcatgccgtatttgattttgctcgcttagtcggctataacagcaataaatatccacaaccagatttaatgagtatgtggactcgtgaagaaattactaataaacaggccgagcaatggctaggcgtgaaaaccattcgataa

SEQ ID NO: 1970 - protein, 139 aa, Haemophilus influenzae
MLHLTLEDELFLGTPKQVGTHSTVFEHFAVMFEDDGETGYFYALDMRQNAQPIVDMLHVYNVDSTSNHHEARKLKICWDESGYLALLLINGYPHAVFDFARLVGYNSNKYPQPDLMSMWTREEITNKQAEQWLGVKTIR

SEQ ID NO: 1971 - DNA, 1311 bp, Haemophilus influenzae
atggcaaaaatcgttaaagtgattggtcgcgaaatcatcgactcacgcggtaatccaactgttgaagctgaagttcatcttgaaggtggttttgttggtttagcagcagctccatctggcgcatcaactggttctcgtgaagcattagaattacgtgacggcgacaaatctcgtttcttaggtaaaggcgtattaaaagctgtggcggcagtgaacaacgaaattgcacaagctatcgttggtaaagatgcaacaaaccaagctgaaatcgaccaaatcatgatcgatttagacggaaccgaaaacaaatctaactttggtgcaaatgcaatcttagcggtatctttagcaaatgcaaaagcagctgcagcatctaaaggtttaccactttacgcttacattgcagaattaaatggcactgctggtgtttattctatgccattaccaatgatgaacatcattaacggtggcgaacatgcagataacaacgttgatatccaagaattcatgattcaaccagttggtgcgaaaacattacgtgaagcacttcgtatcggtgctgaagtattccacaaccttgcaaaagtattaaaatctaaaggcatgagcactgcggttggtgacgaaggtggtttcgctccaaacttagcctctaacgcagacgctttagcctgtatcaaagaagcagtagaaaaagcaggttatgtattaggtaaagacgttactttagcgatggactgcgcatcttctgagttctataacaaagaaaatggtatgtacgaaatgaaaggtgaaggtaaatcattcacttctcaagagttcacacactatcttgaagaattaactaaacaatacccaatcgtgtctatcgaagatggtcaagatgaatctgactgggaaggttttgcataccaaactaaagtgttaggcgaccgcgttcaattagtgggcgatgatttattcgtaacgaataccaaaatcttaaaagaaggtatcgaaaaaggtatcgcaaactctatcttaatcaaattcaaccaaatcggttctttaactgaaactttagcagcaattaaaatggcgaaagatgcaggttacaccgctgtaatctctcaccgttcaggcgaaactgaagatgcaactatcgctgatttagcggtgggtacagcagcaggtcaaatcaaaactggttctatgagccgttctgaccgtattgcgaaatacaaccaattaatccgtatcgaagaagcattagaacgcgctggtactccagcagcattcccaggcttaaaagcggttaaaggtcaagcgtaa

SEQ ID NO: 1972 - protein, 436 aa, Haemophilus influenzae
MAKIVKVIGREIIDSRGNPTVEAEVHLEGGFVGLAAAPSGASTGSREALELRDGDKSRFLGKGVLKAVAAVNNEIAQAIVGKDATNQAEIDQIMIDLDGTENKSNFGANAILAVSLANAKAAAASKGLPLYAYIAELNGTAGVYSMPLPMMNIINGGEHADNNVDIQEFMIQPVGAKTLREALRIGAEVFHNLAKVLKSKGMSTAVGDEGGFAPNLASNADALACIKEAVEKAGYVLGKDVTLAMDCASSEFYNKENGMYEMKGEGKSFTSQEFTHYLEELTKQYPIVSIEDGQDESDWEGFAYQTKVLGDRVQLVGDDLFVTNTKILKEGIEKGIANSILIKFNQIGSLTETLAAIKMAKDAGYTAVISHRSGETEDATIADLAVGTAAGQIKTGSMSRSDRIAKYNQLIRIEEALERAGTPAAFPGLKAVKGQA

SEQ ID NO: 1973 - DNA, 1203 bp, Haemophilus influenzae
gtgagccaatattctgaaaacattattattggtgcgggtgcggcaggattattttgtgccgcacaattggctaagctaggcaagtcggtgacagttttcgacaacggcaaaaaaatcggacgtaagattttgatgtcgggcggtgggttttgtaatttcaccaatttagaggttacgcctgctcattatctttcgcaaaatcctcatttcgtcaaatcggcactagctcgttataccaactgggattttatttctttagtggcggagcaagggattgcttatcacgaaaaggaattggggcaattattttgcgatgagggcgcagaacaaatcgttgaaatgctgaaatctgaatgcgataaatctgctgctaagattttattgcgtagcgaagtttctcaagttgaacggattcaaaatgatgaaaaagtgcggtttgttttacaggtaaattcaacccaatggcaatgtaaaaatttgattgttgcgacaggtgggctttctatgcctgggcttggtgcaacgccatttggctatcaaattgcggaacaatttggcattcctgttattccgcctcgtgcgagtttagtgccttttacttatcgagaaacagataaatttttaaccgcactttcaggtattagcttgcctgtcactatcacggcactgtgcggcaaatctttttacaaccagcttttgtttactcatcgtggtatttcaggccctgcggtattgcaaatttccaattattggcagccgactgagtcagtggaaatcgatttattaccgaaccacaatgtggaagaggaaattaatcaagcaaaacaatcttctccaaaacaaatgttgaaaaccatcttggttcgattattgccgaaaaaattggtcgaactttggattgaacaaggcattgtgcaagatgaagttatcgctaacatcagcaaagtgcgggtaaaaaatctggtggattttattcatcactgggaatttactccaaatggcacagagggctatcgtacggctgaagtcacaatgggcggggtggatactaaagtaatttcttctaaaacaatggaaagcaaccaagtcagcggtttatattttattggtgaagtattggatgtgacgggctggctcggtggttataacttccagtgggcgtggagctcggcttatgcttgtgctctaagtatctcaagataa

SEQ ID NO: 1974 - protein, 400 aa, Haemophilus influenzae
MSQYSENIIIGAGAAGLFCAAQLAKLGKSVTVFDNGKKIGRKILMSGGGFCNFTNLEVTPAHYLSQNPHFVKSALARYTNWDFISLVAEQGIAYHEKELGQLFCDEGAEQIVEMLKSECDKSAAKILLRSEVSQVERIQNDEKVRFVLQVNSTQWQCKNLIVATGGLSMPGLGATPFGYQIAEQFGIPVIPPRASLVPFTYRETDKFLTALSGISLPVTITALCGKSFYNQLLFTHRGISGPAVLQISNYWQPTESVEIDLLPNHNVEEEINQAKQSSPKQMLKTILVRLLPKKLVELWIEQGIVQDEVIANISKVRVKNLVDFIHHWEFTPNGTEGYRTAEVTMGGVDTKVISSKTMESNQVSGLYFIGEVLDVTGWLGGYNFQWAWSSAYACALSISR

SEQ ID NO: 1975 - DNA, 1155 bp, Haemophilus influenzae
atgaaaagtatattagatatttttactcgcggttttattcaggttcaaaaaacagtcttttttgcaaccgcacttttattcgcattttccttattcgcccgagcggaaatggtggatacctatcaatttcaaaatcaagatgatcgtactcgcgccgtagagctggcaaaatctttacgctgtccacaatgtcagaaccaaaatttggtggaatctaattctccaattgcttatgacttgcgtcttgaagtgtacaaaatggtggatgagggcaaaagcaatcagcaaattatcgataaaatgacggctagatttggtgattttgtgaattacaaaccgccattcaaatggaatacggcgttgttatggttattgccagtcgctcttttaattttagctgcagtattgctttatttctcaaatagaaaaaaacagttttcagaaaaagtggttgcacaacaactagagaatgatgaaataatttcccacccctcaacctttggcagctccccccgcaagcaaggggagccaagtaaactttctaagggaaaagtgaatagcaaaatttattttgtgctttttactttactcatcgctattccaactgcttattatttttcccttgatcgttttagtcgtgttcaacaaggcgagcaatcgatgattgagcaacataatcaaaatgttgaaatgaatgatgaacacaaaaatgaaaatgtgattgagaagctccaaaataaactgcgaactgatccgaataatgcggaaacttggcttcaacttggagaagcctatgtacagaataatgaatttgatagtgcgcttgtggcttattctaatgcagaaaaattgtcgggaagtaaacctaatattttaggcttggcagccaccgcactttattatcaagcaggccagcaaatgaccccaaaagtcgaacaacttttgaatgaagctttggcaaaagataaaaatgaagtatctagtctttctttgttggcgacaattgccttagaaaatcgccaatatcaacaagccagtgcgtatttacagcagttattagattcaggtaatgcggcagtggatcgtcgttcagttattcaacgaatgaagatgttggattttttacaacgtggtaaaaaaggacaaaatccgtga

SEQ ID NO: 1976 - protein, 384 aa, Haemophilus influenzae
MKSILDIFTRGFIQVQKTVFFATALLFAFSLFARAEMVDTYQFQNQDDRTRAVELAKSLRCPQCQNQNLVESNSPIAYDLRLEVYKMVDEGKSNQQIIDKMTARFGDFVNYKPPFKWNTALLWLLPVALLILAAVLLYFSNRKKQFSEKVVAQQLENDEIISHPSTFGSSPRKQGEPSKLSKGKVNSKIYFVLFTLLIAIPTAYYFSLDRFSRVQQGEQSMIEQHNQNVEMNDEHKNENVIEKLQNKLRTDPNNAETWLQLGEAYVQNNEFDSALVAYSNAEKLSGSKPNILGLAATALYYQAGQQMTPKVEQLLNEALAKDKNEVSSLSLLATIALENRQYQQASAYLQQLLDSGNAAVDRRSVIQRMKMLDFLQRGKKGQNP

SEQ ID NO: 1977 - DNA, 531 bp, Haemophilus influenzae
atgaacaaaaaacttatcttttttacaccgctctttgtgcttttaggcgtgtgtatattattaattgcagggttaaatcaagatccgaaaaaaattgcttcggctttaattgataaacctgttccagagttttatcaggctaatttacatgaaccatcacaaatcgtaagcccgaaagagtttcctaaacagccatttttattaaatgtttggggaagttggtgtggttattgcaaagaagaacatcctctgttaattgagattgcaaaaacgttgcctattgtgggcgtggattaccgtgataatcggaaaaatggcattgaaatgcttaagcgaatgggcaacccgttcgtcttgagcattgatgatagtcatggggaattgggattaaaattgggcgtggatggcgcgccagaaacttatcttgtggatgaaaatggtgtgattcgttatcgccattctggtttattggataaagaaacttggcaaacggtatttttgccgaaaattgaagcattgaagaacaaatga

SEQ ID NO: 1978 - protein, 176 aa, Haemophilus influenzae
MNKKLIFFTPLFVLLGVCILLIAGLNQDPKKIASALIDKPVPEFYQANLHEPSQIVSPKEFPKQPFLLNVWGSWCGYCKEEHPLLIEIAKTLPIVGVDYRDNRKNGIEMLKRMGNPFVLSIDDSHGELGLKLGVDGAPETYLVDENGVIRYRHSGLLDKETWQTVFLPKIEALKNK

SEQ ID NO: 1979 - DNA, 1908 bp, Haemophilus influenzae
atgcttccagaacttggctttttccttcttttactcgcaacagctagcgcgttttttcttgcgttagtgcctcaatttgggttattcaaaaaaaattcgactttaattaatgctgcttggccgcttagttatatttttacccttgcgacgacgttctcaattggtttgcttgcttattcttttgcggtggatgatttcacccttgaatatgtagcggcacattccaactctcaattacctacattttttaaaatggctgccacttggggaggacatgaaggttcaatgttgttttggttattttcattgagtttatggcttgctgcttttgctttttttaatcgaaaaaatgaccgcactttttccgctcaatctttatctttattgggattgatttgctttggttttgcggtgtttattttattttattccaatccatttggacgcattttccctgctcccgcagaagggcgcgatctcaatccaatgttgcaagatgtgggattaattttccatccgcctttattatatgttggctatgtgggctttgtggtaaattttgcaatgagtttgagagcattgatttataaccaatctgcacgacaaattgcccgctcaatgcgtgggtgggtgttggtttcttggttatttttaaccattggcattgtgcttggtgcttggtgggcatattacgagctcggctggggcggttggtggttctgggatcccgtagaaaatgcgtctttaatgccttggttgcttggtttggcgttattacacagtttaatggcgacggaaaaacaaggcgtatttagttattggacaacgcttttttctctgcttgcttttgcctttagcgtattaggcacgtttattgttcgttctggtgcgctcacttctgtgcacgcctttgcattggataacacgcgcggttatgtgttgttattaattttctttgttttgacagcgttagcctttggtttattcgctttacgagcgggaagttcatcagaaagtgcggtgaaatttcagttcgtttctaaatcgggtggcattttattactgaatattttgctgaccattgcgacggtttctacctttttaggtaccttttacccgatgttattccaagcgatgaattggggctcaatttcggtgggaagtccttattttaatagtattttcttccccattattacggcgattttaatcttaatggtaattgtgcttagcatacgtaaggggcaatttgatcgcacattattgatacgttgtgggtggttgcttattccgtctttgattcttgcatgcctaatgatttggcaacagctacgccataattctgcgttgaattttcacgctttcgcctttgtgttattaactcttgcgatttggcttttattcgtcacgttatggcaaaattggcgacaaattcgcttgtctcaatttgggatgattttagcacactgtggcgtggcgattgtgactattggtgcggtgatgactgggtattttggcagtgaaattggtgtgcgtttagcaccgcaacaaagtcaaacgttagggcaatatgaatttcattatcgccaattttctaatgaaattgggccaaactttacggcagaagtcgccttttttgacgtaactaaaaatggtaaaccttatgcagaaattatcccagaacgccgttattacgatgtacgaacaatgacaatgagtgaagtggggcttgatggtggtttttggggcgatttatatattgtgatgggcgattctctcggcaaaggggaatttactttccgcttacattataaaccactgattcgttggctttgggcgggcggtattttaatggcctttggtgcactttttagcgtcttcggattacgcagaaaacaggaaaaataa

SEQ ID NO: 1980 - protein, 635 aa, Haemophilus influenzae
MLPELGFFLLLLATASAFFLALVPQFGLFKKNSTLINAAWPLSYIFTLATTFSIGLLAYSFAVDDFTLEYVAAHSNSQLPTFFKMAATWGGHEGSMLFWLFSLSLWLAAFAFFNRKNDRTFSAQSLSLLGLICFGFAVFILFYSNPFGRIFPAPAEGRDLNPMLQDVGLIFHPPLLYVGYVGFVVNFAMSLRALIYNQSARQIARSMRGWVLVSWLFLTIGIVLGAWWAYYELGWGGWWFWDPVENASLMPWLLGLALLHSLMATEKQGVFSYWTTLFSLLAFAFSVLGTFIVRSGALTSVHAFALDNTRGYVLLLIFFVLTALAFGLFALRAGSSSESAVKFQFVSKSGGILLLNILLTIATVSTFLGTFYPMLFQAMNWGSISVGSPYFNSIFFPIITAILILMVIVLSIRKGQFDRTLLIRCGWLLIPSLILACLMIWQQLRHNSALNFHAFAFVLLTLAIWLLFVTLWQNWRQIRLSQFGMILAHCGVAIVTIGAVMTGYFGSEIGVRLAPQQSQTLGQYEFHYRQFSNEIGPNFTAEVAFFDVTKNGKPYAEIIPERRYYDVRTMTMSEVGLDGGFWGDLYIVMGDSLGKGEFTFRLHYKPLIRWLWAGGILMAFGALFSVFGLRRKQEK

SEQ ID NO: 1981 - DNA, 804 bp, Haemophilus influenzae
atgaatccaatgttaaatatcgcaattcgtgcggcacgaaaagcgggcaatgtgattgctaaaaattatgaacgccgtgatgctatcgaaagcacacaaaaaggtattaatgattatgtaacaaacgttgataaagcgtctgaagcagaaatcattgaagttattcgtaaatcttatcctgatcacacaattattacggaagaaacaggcgcaattgaaggcaaagatagcgatgtacaatggattattgatccgctagatggtactcgtaattttatgacaggacttccccacttttctgtgtctatcgcagttcgtgtaaaaaatcgcactgaagtcggggttgtttacgatccaatccgtaatgaattatttaccgctgtgcgtggtgaaggtgcaaaattaaatgaagtacgtttacgtgtagatagtaaacgtgaaattcaaggttcaattttagccactggtttcccattcaaacaaccaaaattaatgccaactcaatttgcaatgatgaatgccttaattgaagatgctgcggatttccgtcgtactggttctgccgcattggatttatgctatgtggcgtcaaaccgtattgatggttattttgaaatgggcttaaaagcatgggattgtgctgctggcgatttaatcgtgcgtgaagcaggtggcttagtctgtgattttaatgctggtaacagctacttacgcagtggcaatatcattgctgcaccatcacgcgtaattaaagaaatgttaaataaaattcgcccttgtttaggtgctgaatttaatcattaa

SEQ ID NO: 1982 - protein, 267 aa, Haemophilus influenzae
MNPMLNIAIRAARKAGNVIAKNYERRDAIESTQKGINDYVTNVDKASEAEIIEVIRKSYPDHTIITEETGAIEGKDSDVQWIIDPLDGTRNFMTGLPHFSVSIAVRVKNRTEVGVVYDPIRNELFTAVRGEGAKLNEVRLRVDSKREIQGSILATGFPFKQPKLMPTQFAMMNALIEDAADFRRTGSAALDLCYVASNRIDGYFEMGLKAWDCAAGDLIVREAGGLVCDFNAGNSYLRSGNIIAAPSRVIKEMLNKIRPCLGAEFNH

SEQ ID NO: 1983 - DNA, 513 bp, Haemophilus influenzae
atgcagaaaggtatgacattagtggaattattgattgggttagccattatcagtattgcgctgaattttgcagcaccattatggaaaaccgattcacctaaaacgattttagccaaagagcaacatcgcctgtatttatttctacgccaaattcaggctcgtgcagaaaattcatcggaagtgtggtttttacttatcaatcgtaatcttgcgacacagcaatggtgcttaacagcacaagtaaaaaataaccaaacttgtgattgtttaaatccgataaattgcccgaaagaggtttatgctcatttttactacccttattttcctaacaaaacgatgattcaaagtcatcatatttatccaaaagaaatcacgagatttgatggcattcgtaatactatcgttactcgttgctttattttgcaagctgaaaatgaacgtacgttatttttatttttcaatgttggcagtattcgtttgaaaactaatcaatttgatagtgcttgtaattaa

SEQ ID NO: 1984 - protein, 170 aa, Haemophilus influenzae
MQKGMTLVELLIGLAIISIALNFAAPLWKTDSPKTILAKEQHRLYLFLRQIQARAENSSEVWFLLINRNLATQQWCLTAQVKNNQTCDCLNPINCPKEVYAHFYYPYFPNKTMIQSHHIYPKEITRFDGIRNTIVTRCFILQAENERTLFLFFNVGSIRLKTNQFDSACN

SEQ ID NO: 1985 - DNA, 675 bp, Haemophilus influenzae
atgatttcactgtctttgtcgtctttattattgctaagcatttcgcatttttatgtgcaaatacaaacgcaaaatcaacacatgctattacatttaaagttacaggctgaattacaacgaacattacagttaataggtaaagatcttcgccgattaggatttcgagcattaaatgcaaaactgacggaaagcaatttatctttatttgaattagatgaacaaggcacagctatttttattagccaagaagataatgcgccacctaatagctgcgtgttgttcttttatgatttaaataaaaatgggtgtgttggcaaaggttcgccgaaaacctgtatgaaaaaaggtaaaaatacatctaaaagtagtactgaagaattattcggctataaagtgagtaacaaaatgataaaaaccaaactgacttatcaaagtgttattcctactaattgcacggcagaaacttgtaaacgtgcttttcaacaaaccgcttgtaacgctggtggtggatgggcagatttattagataacaacgaatatgaaatcactaggttacaatttaattggttaattgaaggcaaaggattagaaatcaagctaaaaggaaatttaaaacaaaccccaaatatcagttatgaaacatcccttgttgttgcactatggaatcaaaaataa

SEQ ID NO: 1986 - protein, 224 aa, Haemophilus influenzae
MISLSLSSLLLLSISHFYVQIQTQNQHMLLHLKLQAELQRTLQLIGKDLRRLGFRALNAKLTESNLSLFELDEQGTAIFISQEDNAPPNSCVLFFYDLNKNGCVGKGSPKTCMKKGKNTSKSSTEELFGYKVSNKMIKTKLTYQSVIPTNCTAETCKRAFQQTACNAGGGWADLLDNNEYEITRLQFNWLIEGKGLEIKLKGNLKQTPNISYETSLVVALWNQK

SEQ ID NO: 1987 - DNA, 684 bp, Haemophilus influenzae
atgacaatacaaaaaggcattatcacgctgactattctgatttttatttcaggtttattaaccgtaatcttattgttggatgacagccatttaagtttttttcgtgcacaacaaaatcaacgaaaacactatgtggaaagaacattacaactacaaaaaatgacagaggagaaaaaacaaactgcctgtattgatttacccttaaataataatgaaagagtgaagcaaatcagcatcgcccttgagggtgccgccgatgcaattcaatattttctttggtgtgaaagaatgagcctatttaaaaaatcgcctaaaaagggagataatcaaggcgcattgaaagattttgtgagtggcgaaaaacttgcctattttcgaccgcacttttcttccctgcccagaattttaaatgcgaataaaatgcctaaactgtattggttttcagattcacaagcagaggttgaaattaatggcaccgtatctgccgtattaattgcagagggcgatttaaaattgactggcaaagggaggattagtggcgcagtgattaccagcgggaatttaactttagatggcgtaactttagcttatgggaaaaagacggtggttgctttagtgcaacaatatagtcagtggcagttagcagaaaaaagttggagtgattttaatgttcaggatgaataa

SEQ ID NO: 1988 - protein, 227 aa, Haemophilus influenzae
MTIQKGIITLTILIFISGLLTVILLLDDSHLSFFRAQQNQRKHYVERTLQLQKMTEEKKQTACIDLPLNNNERVKQISIALEGAADAIQYFLWCERMSLFKKSPKKGDNQGALKDFVSGEKLAYFRPHFSSLPRILNANKMPKLYWFSDSQAEVEINGTVSAVLIAEGDLKLTGKGRISGAVITSGNLTLDGVTLAYGKKTVVALVQQYSQWQLAEKSWSDFNVQDE

SEQ ID NO: 1989 - DNA, 297 bp, Haemophilus influenzae
atgttcaggatgaataaaggaatatcttttattacattgttattttctttagctttatttagcgttttatttcttgtttttaatcaatggacggcaagccaaagaaaaagtgcggtaaaaacttatcaagattttcaggcaatacagattgcggagaatcaagctcaacgccaatttttagggttagcttgtgaacaattgatacaacaaaatggcttaacttttcgtattcaatgtgaaaatgaacgtattattgtgcgttatcctacgagtgaaattttgataaaaactcagtaa

SEQ ID NO: 1990 - protein, 98 aa, Haemophilus influenzae
MFRMNKGISFITLLFSLALFSVLFLVFNQWTASQRKSAVKTYQDFQAIQIAENQAQRQFLGLACEQLIQQNGLTFRIQCENERIIVRYPTSEILIKTQ

SEQ ID NO: 1991 - DNA, 3381 bp, Haemophilus influenzae
gtgttcattgtttattattccaatcagcttgaaaaacaaaaagaaattctttcttcattattcaaatctttaccgcctgaagatccttttcaacaagatattatcttggtacaaagccctaatatggcgcaatggctacaaattgaacttgccaaagaaacaggtatttcagcaaacctaaaatttcctatgccagccagttttatatggcaactttatgcacaaaatttacccgcaacggcattagagaacccttttgataaagattcaatgatgtggcgtttaatgcgcttaatcccaatttttcttgagaaagaaaatttttcgcctctacgcaattatttatcatcttcgccacattctgaacaatataaactttatcaactcagcagtaaaatagccgacttatttgaccaatatttagtttatcgacctgaatggatttttgcttgggaaaaaggcgaagatgaacaaatcactgatcaaatacaaaaacaacaacctaacctaaacgcaactttgtttgcgcaaattcaaggcaatacaaaatggcaaggtgagttatggcgtgcgttggtcgtcgatgttaaatcagatgttaatgaagccacccatcgagcagctttgcataatcaattcttagccttgcttgccgataaaaaagcaccgaaaaaattaccttcacgcatatttatttttggtattcctgcgcttccaactgcttatcttaatattttgcaagcgatatcctctgaagtggatattcatttattttttaataatccttgccaagaatattggggagatattagcgatttacgccttgattatttgcgttctcgcaaacgttatcaattcaataaacaagatgaaaataaaccgctcttttccgaggatcaactttctcaactagaaaacgctcagtttgacgtcacttatcaaaaagaaaaccttcaactaggcaatccattactggcggcttggggaaaaatggggcgagattttctctatacattggtgagagatgaagaacatattccaacttatcccgtcaatgcctatcaagaaattgagtcgaacagtttactcggacaattacagtctcaaattctgcatttagaaaataaaccgctaaatatcgcaaaaaatgaccgcactttaaccctacattcttgccacagtgctatgcgagaagtggaagtattgcacgattatttactggatttattcaatcaagatcctagccttacgccaaaagatgtggttgttatgatggcagatattaaccaatatacaccttatattcaggcagttttcgggcaaaaaaatggagatgcaccacaaattccattttcactttcagataataaactttcagaaagcgatgtgttggtctcaagttacttaactttattacgcttaaaagaaagcaattttagtgcagaagatgtcttggcattgttggatattcctgcgatgcgagaacgatttaatatttctcttgctgatttgccattagtgcgagaatgggtaacggattcagggattcgtttcggtttgcaaaaaaatcaagatggcatcaatttcaattcttggcaggctggattagaacgaatgattttaggctatgcgatgcgtgaagaacagggcatttggcaagatagtctgggcttaaacagcagttatggcttaaagggcgagcttgctggaaatttatctcactttttcaccgcactttccgcgctgcatgaaacgctgcaacaagcacattccatcgaaaaatggcaagaaattttaaccgcacttttatcggatttcttcgtgcgaaatgaagacacaagcgacatgattttctatattcaagagaaaattaatgaattagctgagcatctaaaaacgctccattttaatgaagaattacaagcagaagtgatcgccgatgtcatcacaatgcaattggaagatgcgccaaatagcctcaaattccttgcaggaaaagtaaatttctgcaccttattaccaatgcgttcagtgccattcaaagtggtttgtttacttggaatgaatgatgcggattacccaagaacacaaacaccaaacagttttgatttaatgcaatatcattatcaaaaaggcgatcgtgttcgccgtgatgatgatcgctatttgttcttagaagccttattggcagcacgtgattattgctatatcagctatgttgggcgttccattacagataatcaaccgaaagaaccttctgtattggtaagccaactgttggattatattaatcaagggcaaaaggaaaatgtccttactgtcattgaacatccaatgaccgcatttagcccagataatttcaaatataacgaaaaatttacccgctcttttgcgacaaaatggttgccaatagcacaatttgacgcgagttccaacaattcagaatttgccgtcactatgacagaaaacccagaaaaaatcgaagaagttgaactggattctttagtcagctttgtggaaaatccagtgaaatttttctttgaaaaacaactcggtgtttatttccgcgataaagatgaacgcattgctgacagtgaaaacttcactttaagtgggttagataattattctctcaataatgacttaatttaccttgatgaacaaaattttgctgattattttagacaagcagaagtaaaaggcgtgttaccgcgcgcagagtttggaaaggtttatgctgaaaatattcgtgacaatgttttagaatttaaagagaaaatagccgatcttggcgagcctaaacaggcttctatagattttaatattgccgtagattggcaaaacgaaaatcaaaaaatccgtttatttggttatatggaggctttatttggcgatgattcacaagtcattcactggcattttgcgaaatacaaagatcgttattgtattcgtccttggatttattatttaattcaatgtgttacacaagaaaatgcggtaccagcaaaattaattacgcaagataaggttctcgaattaccgcctattgagcgtgaagttgcgcttgctcaattacaaatttacgtaaaagattatttacaaagccaaatagaaattcaattggtgccaaccataagaaatattaatgattttattgtagacgatgaaagtgcggtagattttgacaacgtttttgaaaaacttcaggcattaactgaaagtaatggtttcggttcaaaagccgatccatattggtcacgagtattagcgcagacctcaagatttaaacaacctgaaaatattgcaaaattattaaaacaaacaaaagcttggtttggcttattattcgcacaaaagaagacaagaaaggcacaaagctaa

SEQ ID NO: 1992 - protein, 1126 aa, Haemophilus influenzae
MFIVYYSNQLEKQKEILSSLFKSLPPEDPFQQDIILVQSPNMAQWLQIELAKETGISANLKFPMPASFIWQLYAQNLPATALENPFDKDSMMWRLMRLIPIFLEKENFSPLRNYLSSSPHSEQYKLYQLSSKIADLFDQYLVYRPEWIFAWEKGEDEQITDQIQKQQPNLNATLFAQIQGNTKWQGELWRALVVDVKSDVNEATHRAALHNQFLALLADKKAPKKLPSRIFIFGIPALPTAYLNILQAISSEVDIHLFFNNPCQEYWGDISDLRLDYLRSRKRYQFNKQDENKPLFSEDQLSQLENAQFDVTYQKENLQLGNPLLAAWGKMGRDFLYTLVRDEEHIPTYPVNAYQEIESNSLLGQLQSQILHLENKPLNIAKNDRTLTLHSCHSAMREVEVLHDYLLDLFNQDPSLTPKDVVVMMADINQYTPYIQAVFGQKNGDAPQIPFSLSDNKLSESDVLVSSYLTLLRLKESNFSAEDVLALLDIPAMRERFNISLADLPLVREWVTDSGIRFGLQKNQDGINFNSWQAGLERMILGYAMREEQGIWQDSLGLNSSYGLKGELAGNLSHFFTALSALHETLQQAHSIEKWQEILTALLSDFFVRNEDTSDMIFYIQEKINELAEHLKTLHFNEELQAEVIADVITMQLEDAPNSLKFLAGKVNFCTLLPMRSVPFKVVCLLGMNDADYPRTQTPNSFDLMQYHYQKGDRVRRDDDRYLFLEALLAARDYCYISYVGRSITDNQPKEPSVLVSQLLDYINQGQKENVLTVIEHPMTAFSPDNFKYNEKFTRSFATKWLPIAQFDASSNNSEFAVTMTENPEKIEEVELDSLVSFVENPVKFFFEKQLGVYFRDKDERIADSENFTLSGLDNYSLNNDLIYLDEQNFADYFRQAEVKGVLPRAEFGKVYAENIRDNVLEFKEKIADLGEPKQASIDFNIAVDWQNENQKIRLFGYMEALFGDDSQVIHWHFAKYKDRYCIRPWIYYLIQCVTQENAVPAKLITQDKVLELPPIEREVALAQLQIYVKDYLQSQIEIQLVPTIRNINDFIVDDESAVDFDNVFEKLQALTESNGFGSKADPYWSRVLAQTSRFKQPENIAKLLKQTKAWFGLLFAQKKTRKAQS

SEQ ID NO: 1993 - DNA, 450 bp, Haemophilus influenzae
atgcactgtccattttgtgatacagaagaaactaaagtcattgatagccgtttagtatctgatggttatcaagttcgccgccgccgtgagtgcggtcattgtcacgaacgttttactacttttgaaatggcagaattaatcataccgaaaattatcaaaactgatggtacacgtgagccattcaatgaagataaattgcgcagcggtattcaacacgccttagaaaaacgtcctgtaagtgcagatgatgtagaaaaagcaattaatcacataattcttcaactgcgtgcaactggagaacgtgaagtgccaagtaagttagtgggtaaacttgcgatgaatgaattaaaaaaactcgataaagtggcttatattcgttttgcatcagtctatttaagttttgatgatattgatcaattcactatcgaaattgaaaaattaaaggattaa

SEQ ID NO: 1994 - protein, 149 aa, Haemophilus influenzae
MHCPFCDTEETKVIDSRLVSDGYQVRRRRECGHCHERFTTFEMAELIIPKIIKTDGTREPFNEDKLRSGIQHALEKRPVSADDVEKAINHIILQLRATGEREVPSKLVGKLAMNELKKLDKVAYIRFASVYLSFDDIDQFTIEIEKLKD

SEQ ID NO: 1995 - DNA, 1119 bp, Haemophilus influenzae
atgcttgaattttcctcacaagattgcgtatttatgcaacgtgccttagatttggcagccaaaggacaatataccactacaccgaacccatcggtgggatgcgtattggtaaaaaatggtgaaattgtgggggaaggctttcattttaaggcaggacaacctcatgctgaacgcgttgctttagctcaagcgggtgaaaatgctaaaggagcaaccgcttacgtcaccttagagccttgcgctcattatggtcgcacaccaccttgtgcattaggattaattgaggcgggcgtagtgaaagtcattgcggctatgcaagatccgaatcctcaagtcgcaggaaaaggtttgaaaatgttgtctgatgctggtatcgaaagtgcggtgaatttattgaacgatcaagcggaaaaaataaataaaggctttttaaaacgaatgcgtcaaggtatgccttttgttcaactcaaactcgccatgagtttagatggacgaactgcaatggcaagtggagaaagtaaatggattacgggcccagatgctcgttcggacgtacaaaaaatgcgagcaaaatcatccgcacttttatctacttccacaacagtcattgcagacgatccaagcctgaacgtacgctgggatgaatttcctgaaaatcttaaaacaggatataaaaaagaatggcttcgccagcctgtgcgagtcattttagattcacaacatcgcattcagccgactcataaactttttttaacccattctcccgtttggttagtctctagtgagccacgagatttaacaggctttcctgatttttgtgaaaaaattattcttccgaaagaaaatttactaaaagaattaatgcgagaactgggaaaacgacaaatcaataccctttgggtagaggctggagcaaatttagcgggtagtttaattgatgcgaaattagtagatgaattgattatttacgttgcgcccaaattacttggcgacaatgctcgtggtctatgccaattaccgaatttaactaaacttgccgatgcaccattatggcaactcaatgaattagaacaaatcggtgacgatataaaattaacttacacaccgaaaggagtctaa

SEQ ID NO: 1996 - protein, 372 aa, Haemophilus influenzae
MLEFSSQDCVFMQRALDLAAKGQYTTTPNPSVGCVLVKNGEIVGEGFHFKAGQPHAERVALAQAGENAKGATAYVTLEPCAHYGRTPPCALGLIEAGVVKVIAAMQDPNPQVAGKGLKMLSDAGIESAVNLLNDQAEKINKGFLKRMRQGMPFVQLKLAMSLDGRTAMASGESKWITGPDARSDVQKMRAKSSALLSTSTTVIADDPSLNVRWDEFPENLKTGYKKEWLRQPVRVILDSQHRIQPTHKLFLTHSPVWLVSSEPRDLTGFPDFCEKIILPKENLLKELMRELGKRQINTLWVEAGANLAGSLIDAKLVDELIIYVAPKLLGDNARGLCQLPNLTKLADAPLWQLNELEQIGDDIKLTYTPKGV

SEQ ID NO: 1997 - DNA, 1023 bp, Haemophilus influenzae
atgcttaaaaaacttttccattccgcactttggggcttggctgctgcgggcgtgattttgtttgcggttccaagactgaataacagcaatatcttcacttcagacgatattgtatcgttcaaaaatgccgtgcgtattgcctctccagcagtagtgaatgtttataaccgctctttttcttccgccagcattaatgataatgatcagctacaagtgaataacttaggttctggtgtgattatgagtaaagatggctatattctgacgaataaacacgtcattcaaaatgcagatcaaattgtagtagcgttgcaaaacggaaatatttttgaggccagtcttgttggttcagatgatctcactgatctcgctgttcttaaaattcgtgcagataatctttcaactattccacaaaattcagcgcgtcaagctcacgtcggcgatgtggtattagcaatcggtaatccctacaacttaggacaaagcgtgtctcaaggaatcattagcgcaatgggtcgtaatgcggtaggcgattcggtgggcagacaaaattttattcaaactgatgcttcaattaatcgcggaaactcaggcggtgccttaattaactctgctggggaattggttggaattagcacgctaagtattggcaaaaccgccaatgaaatcgcagaaggactaaattttgccattccaatagatattgcaaatgatgtactacgtaaaattatgcgtgatggacgtgtgattcgaggttattttggtgtacaaagtgatattagttcaagtagtgaagaaggcatagttatcacagacgtaagcccgaacagcccagctgcgaaatcaggtattcaagttggcgatgtgattttgaaattaaataatcaagaaggtatttcagcccgagaaatgatgcaaattatcgcaaatacaaaacctaattcaaaagttctcgtcaccattctacgattaggcaaaatcttacaaattccagttgttattgaagaatttccagtaaattaa

SEQ ID NO: 1998 - protein, 340 aa, Haemophilus influenzae
MLKKLFHSALWGLAAAGVILFAVPRLNNSNIFTSDDIVSFKNAVRIASPAVVNVYNRSFSSASINDNDQLQVNNLGSGVIMSKDGYILTNKHVIQNADQIVVALQNGNIFEASLVGSDDLTDLAVLKIRADNLSTIPQNSARQAHVGDVVLAIGNPYNLGQSVSQGIISAMGRNAVGDSVGRQNFIQTDASINRGNSGGALINSAGELVGISTLSIGKTANEIAEGLNFAIPIDIANDVLRKIMRDGRVIRGYFGVQSDISSSSEEGIVITDVSPNSPAAKSGIQVGDVILKLNNQEGISAREMMQIIANTKPNSKVLVTILRLGKILQIPVVIEEFPVN

SEQ ID NO: 1999 - DNA, 816 bp, Haemophilus influenzae
atgccggaacttcctgaagtcgaaactgcactacgtggtattagcccttatcttaagaattttacgattgagaaagttgtcgtgcgccagcctaaattgcgctgggctgtatcagaggaattgataacccttaaaaatgtaaaaattgtcgatctcactcgtcgagcaaaatatttgattattcacacggaaaaaggctatatcatcgggcatttgggcatgtcaggttcagtgcgaattgtgccacagaatagcgcaatagataaacatgatcatattgatattgtaatgaataatggcaagttattacgctataacgatcctcgccgtttcggtgcatggttgtggacggagaatctagatgactttcatcttttcttaaagttaggccctgaaccactttctgatgaatttaatgcagaatatttattcaaaaaatctcgtcaaaaatcaaccgcacttaaaactttcttgatggataacgctgtggtagtgggcgttggaaatatttatgcgaatgaaagtttgtttatttgtggcattcatccccttaaactcgctaaaaatttgactcgcaatcaatgtttctctttagtgaacacgattaaagatgttttgagaaaagccattattcaaggtggaacaacacttaaagattttttacagcccgatggtcgcccaggttattttgcacaagaattattggtgtatggcaataaagataaaccttgtccaaagtgcggtggaaaaattgaaagtttaattattggacagcgtaatagtttcttttgcccgaaatgtcagaaaaggggttag

SEQ ID NO: 2000 - protein, 271 aa, Haemophilus influenzae
MPELPEVETALRGISPYLKNFTIEKVVVRQPKLRWAVSEELITLKNVKIVDLTRRAKYLIIHTEKGYIIGHLGMSGSVRIVPQNSAIDKHDHIDIVMNNGKLLRYNDPRRFGAWLWTENLDDFHLFLKLGPEPLSDEFNAEYLFKKSRQKSTALKTFLMDNAVVVGVGNIYANESLFICGIHPLKLAKNLTRNQCFSLVNTIKDVLRKAIIQGGTTLKDFLQPDGRPGYFAQELLVYGNKDKPCPKCGGKIESLIIGQRNSFFCPKCQKRG

SEQ ID NO: 2001 - DNA, 1536 bp, Haemophilus influenzae
atgtcaaacctcaaacaacacaaacaagctttgttttgcaacgataacgaagccattaacgattatgaaacagcgatgcataatgcggtgcaagcggtctctgcttggctgaaaaatgaaaaaatgtacacgggcggttcaatcaaacaaatgcgagccttaataagcggttttaatccgacgaaagagggtatgggtgtacagaaatcactcgatcatttggtagaaattttccttaatccaagccttaaagtacatcatccacactcacttgcccatttacattgcccaacgatggtaacaagccaaattgcggaagtactgattaatgcgaccaaccaatcaatggattcgtgggatcaaagcccagcgggttcgattatggaagagcatttgatcaactggctacgccaaaaagcaggctatggcgaaggcacatcaggcgtgttcacttctggtggtactcaatctaacttaatgggcgtattgttggcacgcgattgggcgattgcaaaccactggaaaaacgaagacggctctgaatggtcagtacaacgtgatggtattccagcagaagcgatgcaaaaagtgaaagtgatttgttcagaaaacgcacatttctctgtacaaaaaaatatggcaatgatgggcatgggtttccaatcagtcgttactgtgccatcaaatgccaatgcacaaatggatcttattgcacttaaacaaacacttgcacagcttaaagctgatggcaaaattactgcctgtattgttgctaccgcaggcacaacagatgctggcgcaattgatgacttaaaagccatccgcaaacttgccgatgaatatcaagcgtggttacacgttgatgccgcttggggtggcgcattattgctttccaaagattatcgctatttcttagatggtattgaattaactgattccatcacgcttgatttccacaaacacttcttccaaaccatttcctgtggtgcatttttactcaaggatccagagaactatcgctttatcgattacaaagcggattatctcaattcggaatatgatgaagctcacggcgtgccaaacttagtggcaaaatcgctacaaaccacacgtcgtttcgacgcattaaaattatggtttacccttgaagcattgggcgaagagctttacgcttcaatgatcgatcacggcgtaaaactgaccaaagaagtcgagcaatacatcaacgatacccctgacttagagatgcttgtgccaagtcagtttgcatcggtgttattccgtgtcgtaccaaaagactatccagctgaatttattgatgcactaaaccaaaacgtggcagatgaactctttgcacgaggcgaagcaaatattggcgtgactaaagtaggcgacaaacaatcgctgaaaatgactaccctaagcccgattgcaacattggaaaatgttaaagcgttattaactcaagtactaacagaagcaaatcgtattaaagacgacatcaaaaatggcacttacacaccacccattgattaa

SEQ ID NO: 2002 - protein, 511 aa, Haemophilus influenzae
MSNLKQHKQALFCNDNEAINDYETAMHNAVQAVSAWLKNEKMYTGGSIKQMRALISGFNPTKEGMGVQKSLDHLVEIFLNPSLKVHHPHSLAHLHCPTMVTSQIAEVLINATNQSMDSWDQSPAGSIMEEHLINWLRQKAGYGEGTSGVFTSGGTQSNLMGVLLARDWAIANHWKNEDGSEWSVQRDGIPAEAMQKVKVICSENAHFSVQKNMAMMGMGFQSVVTVPSNANAQMDLIALKQTLAQLKADGKITACIVATAGTTDAGAIDDLKAIRKLADEYQAWLHVDAAWGGALLLSKDYRYFLDGIELTDSITLDFHKHFFQTISCGAFLLKDPENYRFIDYKADYLNSEYDEAHGVPNLVAKSLQTTRRFDALKLWFTLEALGEELYASMIDHGVKLTKEVEQYINDTPDLEMLVPSQFASVLFRVVPKDYPAEFIDALNQNVADELFARGEANIGVTKVGDKQSLKMTTLSPIATLENVKALLTQVLTEANRIKDDIKNGTYTPPID

SEQ ID NO: 2003 - DNA, 399 bp, Haemophilus influenzae
gtgttgaaatatatgcttgatactaacattgtgatttacgtgattaagcgtaggccattggaaattctttctcgctttaatcaaaatgcaggaaaaatgtgcgtgagtagcattactgtggctgaactctattatggagctgaaaaaagcgaatatcccgaaagaaacattgcggttattgaagatttcttatcacgcctcaccattttagattaccaaccaaagcatgcagctcatttcggcaatattaaagctgaactctctaaacaagggaaattgattggcgaaaatgatattcatatagcggctcatgctcgtagtgaagggttaattctggttagtaacaatttaagagaatttgagcgagttatagcattacgtacagaaaattgggtgtaa

SEQ ID NO: 2004 - protein, 132 aa, Haemophilus influenzae
MLKYMLDTNIVIYVIKRRPLEILSRFNQNAGKMCVSSITVAELYYGAEKSEYPERNIAVIEDFLSRLTILDYQPKHAAHFGNIKAELSKQGKLIGENDIHIAAHARSEGLILVSNNLREFERVIALRTENWV

SEQ ID NO: 2005 - DNA, 234 bp, Haemophilus influenzae
atgattgaagcctctgtttttatgactaatcgaagtcaagctgtgcgtttgcccgctgaagttcgcttttctgaagaaatcaaaaaattatcggttcgtgtatcgggcagtgatcggattttgtcgcctctcaaccaatcttgggatagttttttcttgaatgatcaaacagttagcgatgattttatgaatgaacgagaaattgcatttcaaccagagcgtgaggctttatag

SEQ ID NO: 2006 - protein, 77 aa, Haemophilus influenzae
MIEASVFMTNRSQAVRLPAEVRFSEEIKKLSVRVSGSDRILSPLNQSWDSFFLNDQTVSDDFMNEREIAFQPEREAL

SEQ ID NO: 2007 - DNA, 1359 bp, Haemophilus influenzae
atgattacccctgtacaagcaattcttgcttcaaaccaacattttttagatcgccaagatgtaatggaatccaacgtacgtagttatcctcgcaaattaccttttgcatatgcaaaagcacaaggctgttgggttactgatgttgaaggtaatgaatacctagactttttagcaggcgcaggaacccttgcattaggacataatcatcctatattaatgcaagccattaaagacgtattagatagcggattgccgttacacactttagatttaaccactccacttaaagatgcgtttagtgaagaattattgtcattcttcccgaaagataaatatatcttacaattcacaggcccttctggtgcagatgcaaatgaagcagccatcaaattagccaaaacttacacaggacgtggcaatatcattgctttctctggcggttttcacggtatgacccaaggggcattagccttaacgggtaatcttggtgcaaaaaatgccgttgaaaatttaatgcctggcgtacaatttatgccatatccacacgaataccgctgcccatttggcattggtggcgaagcgggtgcgaaagcagttgaacaatactttgaaaacttcatcgaagatgtagaaagtggcgtagtaaaaccagctgcagtaattttagaagcaatccaaggagaaggcggcgttgttccagcaccaataagcttcttacaaaaagtacgtgaagtcacccaaaaacacggcattttaatgatcgtcgatgaagtgcaagctggcttctgccgttctggaagaatgttcgcctttgaacacgcaggcattgagcctgatattattgtgatgtcaaaagcagttggtggcagcttaccattagctgtattagctattcgtaaagaatttgatgcttggcaacctgcaggacatacaggtacatttcgtggcaatcaattagcgatggcgacaggctacgcttcacttaaaattatgcgtgatgaaaacctcgcacaaaatgcccaagagcgtggtgaatacttaaccaacgcattacgcgaattaagcaaagaatatccgtgcatcggcaacgtacgtggtcgtggcttaatgatggggatcgatattgtagacgaacgccaatcgaaagatgcgacaggggcttacccgcgcgattgtgaattagcggcagcaatccaaaaagcttgcttcaaaaacaaactcttgctcgaacgtggcggacgcggtggtaacgtggttcgtgtgctttgtgcggtaaacatcaaccaaaatgaatgcgaagaatttatcaaacgtttcaagcaatctgttgtagacgcattgaaagtggtgcgtagttaa

SEQ ID NO: 2008 - protein, 452 aa, Haemophilus influenzae
MITPVQAILASNQHFLDRQDVMESNVRSYPRKLPFAYAKAQGCWVTDVEGNEYLDFLAGAGTLALGHNHPILMQAIKDVLDSGLPLHTLDLTTPLKDAFSEELLSFFPKDKYILQFTGPSGADANEAAIKLAKTYTGRGNIIAFSGGFHGMTQGALALTGNLGAKNAVENLMPGVQFMPYPHEYRCPFGIGGEAGAKAVEQYFENFIEDVESGVVKPAAVILEAIQGEGGVVPAPISFLQKVREVTQKHGILMIVDEVQAGFCRSGRMFAFEHAGIEPDIIVMSKAVGGSLPLAVLAIRKEFDAWQPAGHTGTFRGNQLAMATGYASLKIMRDENLAQNAQERGEYLTNALRELSKEYPCIGNVRGRGLMMGIDIVDERQSKDATGAYPRDCELAAAIQKACFKNKLLLERGGRGGNVVRVLCAVNINQNECEEFIKRFKQSVVDALKVVRS

SEQ ID NO: 2009 - DNA, 171 bp, Haemophilus influenzae
atggcagctaaaggtgctcgtgagaaaatccgtttagtttctactgcagagaccggtcacttctacacaactgataaaaacaaacgtaatatgcctgaaaaaatggaaatcaaaaaatttgatccagtagtgcgtaaacacgttatctataaagaagcaaaaatcaaataa

SEQ ID NO: 2010 - protein, 56 aa, Haemophilus influenzae
MAAKGAREKIRLVSTAETGHFYTTDKNKRNMPEKMEIKKFDPVVRKHVIYKEAKIK

SEQ ID NO: 2011 - DNA, 237 bp, Haemophilus influenzae
atgtctagagtttgtcaagtaacaggcaagcgtccagctgtgggtaataaccgctcacacgcaatgaatgcgacacgtcgtcgttttcttccaaaccttcacactcaccgtttttgggttgaaagtgaaaaccgtttcgtaaccttacgtttaactgcgaaaggtatgcgtatcattgataaaaaaggcattgatgcagtattagctgaaatccgtgctcgtggcgaaaaaatctaa

SEQ ID NO: 2012 - protein, 78 aa, Haemophilus influenzae
MSRVCQVTGKRPAVGNNRSHAMNATRRRFLPNLHTHRFWVESENRFVTLRLTAKGMRIIDKKGIDAVLAEIRARGEKI

SEQ ID NO: 2013 - DNA, 645 bp, Haemophilus influenzae
atgccacgagaaaaattgctggcattcggagcaaaagcattaagtgattatgaactacttgcgatttttttacgtactggtatcaaaggttgtcctgttatgtcactttctaaaaatgtattaacgcattttggctccttgcacgctttactttccgcagataaaaaagctttctgttctgtaaaaggcttaggtattacgcaatttattcaactgcaagcgattacggaaatgaccaagcgttatttaaagcaagatatgttaagtacgccgattattaatgatcctgaaacggtaaaactttttttactcactgaattgcaacacgaggaaagagaagtatttatggttttatttttagataatcaacatcgtttgattaaaaaagagcggttatttttaggtacaattaatgtatcagcggtttatccgcgagaaattattaaagaagcactctattgtaatgcggcagctttaattttggcacataatcatccttcaggtataacggagccgagttattcggatcagcttattactaaaaaaattcaagatgcggctgaactaatggaaattcgcgtgcttgatcatttaattgtagggaaaagcgattgttattctttcgcggagaattgtttattataa

SEQ ID NO: 2014 - protein, 214 aa, Haemophilus influenzae
MPREKLLAFGAKALSDYELLAIFLRTGIKGCPVMSLSKNVLTHFGSLHALLSADKKAFCSVKGLGITQFIQLQAITEMTKRYLKQDMLSTPIINDPETVKLFLLTELQHEEREVFMVLFLDNQHRLIKKERLFLGTINVSAVYPREIIKEALYCNAAALILAHNHPSGITEPSYSDQLITKKIQDAAELMEIRVLDHLIVGKSDCYSFAENCLL

SEQ ID NO: 2015 - DNA, 1203 bp, Haemophilus influenzae
atgaatttaaacggaaaacgtgttgtcgtcggtattacgggcggcattgcagcctataaaacaatagagttgattcgtttattacgcaaagcagaagctgaagtacgtgtagtattaaccccagctgcggcagaatttgttactcctttaacgcttcaagccatttctggcaatgctgtcgcacaatctttacttgatccacaagcagagctggcaatggggcatattgaacttgccaaatgggctgatgccattattattgcaccagctagtgcagactttattgcccgtcttactatcggcatggcgaatgatttactttcaacaatttgtcttgcaactgatgcaccaatttttcttgcgccagcaatgaatcagcagatgtatcaccaatccattactcaacaaaatttaacgactcttcaaacacgtgggattgagcttattggccccaatagtggttttcaagcttgcggcgatatggggaaagggcgtatgtcagaaccagaggaaatttttaccgcactttctgactttctctatcaaaaacaagatctacaaggattaaatgtcgccattacagcaggcccaacgcgtgaggcaatcgatcctgttcgttatatttctaaccatagttcagggaaaatgggatttgcgattgctgaagcatttgcaaaacgaggagcgaacgtcacgctgatttcaggccccgtgaatttaacaacaccaaaaaatgtaaatcgaattaatgtcatctcagcacaagaaatgtggcaagcctctcttgaaagtgcggtaaaaaatcaaatttttattggttgtgcggctgtcgctgattacagagtatctgaagttgcagagcaaaaaatcaaaaaatctggcgatgaaatatctatcaaattaattaaaaatcccgatattatctcagatgtaggacatttaaaaacacatcgtccttttactgttggatttgcagccgaaacccaaaatgttgatgattatgcaaaagataaacttgaacgcaaaaatcttgatatgatttgtgccaacgatgtatctggcggacaagtttttaacgcggatgaaaattccttgcagcttttttggaaaaatggtcataaaaaattatcgctaaaatcaaaagtagaacttgccgctgatttagtcaatgaaatcatcgaacgctatcaaaaaaccttataa

SEQ ID NO: 2016 - protein, 400 aa, Haemophilus influenzae
MNLNGKRVVVGITGGIAAYKTIELIRLLRKAEAEVRVVLTPAAAEFVTPLTLQAISGNAVAQSLLDPQAELAMGHIELAKWADAIIIAPASADFIARLTIGMANDLLSTICLATDAPIFLAPAMNQQMYHQSITQQNLTTLQTRGIELIGPNSGFQACGDMGKGRMSEPEEIFTALSDFLYQKQDLQGLNVAITAGPTREAIDPVRYISNHSSGKMGFAIAEAFAKRGANVTLISGPVNLTTPKNVNRINVISAQEMWQASLESAVKNQIFIGCAAVADYRVSEVAEQKIKKSGDEISIKLIKNPDIISDVGHLKTHRPFTVGFAAETQNVDDYAKDKLERKNLDMICANDVSGGQVFNADENSLQLFWKNGHKKLSLKSKVELAADLVNEIIERYQKTL

SEQ ID NO: 2017 - DNA, 456 bp, Haemophilus influenzae
atgaaaaaaattgacgtaaaaattttagattctcgcattggaaatgaatttcctttgccaacttacgcaactgaaggttcagcaggtcttgatttacgtgcgttgatcgatgaaagctttgaaattcaaccaggcgaaaccaaattaattccgacagggctatcaatttatattgcggatcccaatttagctgccgtgattttgcctcgctcgggtcttggccataaacacggcattgtgttaggaaaccttgtgggattaattgactccgattatcaagggccattaatggtatcaatgtggaaccgtggaaatgaaccattcaaaattgaagtcggcgatcgtattgctcaacttgttttcgtgccagtagtacaagctgaatttaatattgtagaagattttcaacaaaccgaacgtggagaaggcggtttcggtcattcaggtaaacaataa

SEQ ID NO: 2018 - protein, 151 aa, Haemophilus influenzae
MKKIDVKILDSRIGNEFPLPTYATEGSAGLDLRALIDESFEIQPGETKLIPTGLSIYIADPNLAAVILPRSGLGHKHGIVLGNLVGLIDSDYQGPLMVSMWNRGNEPFKIEVGDRIAQLVFVPVVQAEFNIVEDFQQTERGEGGFGHSGKQ

SEQ ID NO: 2019 - DNA, 657 bp, Haemophilus influenzae
atggtagaagaacaattatctttatcaggcgtagaagaaattgcgcctaaaattgaaacaccgaaaattgaaaaaagaacggtaaaagaacgtcgtcagcaagtgcttacagtattgatacatatgcttcattctgaacgtggaatggaaagaatgacaaccgctcgtctagcaaaagaagttggtgtgtcggaagctgcgttatatcgttactttccaagcaaaacaaaaatgtttgaagcactaattgaacatattgaaagtactttgctgagccgaattacagcgtcaatgcgtaacgaaactcaaacaatgaatcgcattcacgacattttacaaacaattttggattttgcccgaaaaaatcccggcttaacacgtgttctaacaggtcacgcgttaatgtttgaagaagcgcaattacaagcacgtgtggcacaatttttcgatcgtcttgagatgcagtttgtcaatattttgcaaatgcgtaaattacgtgaagggcgtgctttcaacgtggatgaacgtataattgcctcacatttagtgacactctgcgaaggacaatttatgcgctatgttcgtacaaatttccgtctgaattcaagtcagtcttttgaacaacaatggcgttttatagagccactttttgcctaa

SEQ ID NO: 2020 - protein, 218 aa, Haemophilus influenzae
MVEEQLSLSGVEEIAPKIETPKIEKRTVKERRQQVLTVLIHMLHSERGMERMTTARLAKEVGVSEAALYRYFPSKTKMFEALIEHIESTLLSRITASMRNETQTMNRIHDILQTILDFARKNPGLTRVLTGHALMFEEAQLQARVAQFFDRLEMQFVNILQMRKLREGRAFNVDERIIASHLVTLCEGQFMRYVRTNFRLNSSQSFEQQWRFIEPLFA

SEQ ID NO: 2021 - DNA, 273 bp, Haemophilus influenzae
ttgactttaccgagtaaatatatgattattccttggcaagaactagaagcagaaacattagataatatcgtagaaagcgtgattttacgcgaaggaaccgattacggtatagaagaactttcactcaaccagaaaaaacaacttttactgactcaaattcgcaatggaattgcgttgattgtatggtctgaattacatgaatccattgacatcaaaaataaaacggaatttttgaaacaggaatgtaaggagcaagaatgtcaaatgaattaa

SEQ ID NO: 2022 - protein, 90 aa, Haemophilus influenzae
MTLPSKYMIIPWQELEAETLDNIVESVILREGTDYGIEELSLNQKKQLLLTQIRNGIALIVWSELHESIDIKNKTEFLKQECKEQECQMN

SEQ ID NO: 2023 - DNA, 675 bp, Haemophilus influenzae
atgtcaaatgaattaaccgaaattgatgaagttgtaacctcctctcaagaagaagcaactcaacgagatcccgttttagattggtttcttactcactgccatttgcataaatatcctgcaaaatcaactttaattcatgctggggaagatgcgaccacgctgtattatgtaattaaaggttctgtaatggtatcttcaaaagatgatgaaggcaaagagatgatcctcacttacttaggtgcaggacaattttttggcgaagctggattatttgatgaaggttcaaaacgatcagcttgggtaaaaacaaaaacaacatgtgaaattgctgaaatttcctataagaaatatcgccagttgattcaggcaaaccctgaaatcttaatgtttctcactgcacaattggcaagacgtttgcaaaatacatcacgtcaagtcacgaatttggcatttttagacgttgcaggtcgcatcgctcaaactttaatgaacttagctaaacagcctgaagcaatgacgcatcctgatggtatgcaaatcaaaattacacgccaagaaatagggcaaatggtgggttgttcacgagaaactgtggggcgcattattaagatgttggaggatcagaatcttatccacgctcatggaaaaacaatcgttgtatatggcgcaagataa

SEQ ID NO: 2024 - protein, 224 aa, Haemophilus influenzae
MSNELTEIDEVVTSSQEEATQRDPVLDWFLTHCHLHKYPAKSTLIHAGEDATTLYYVIKGSVMVSSKDDEGKEMILTYLGAGQFFGEAGLFDEGSKRSAWVKTKTTCEIAEISYKKYRQLIQANPEILMFLTAQLARRLQNTSRQVTNLAFLDVAGRIAQTLMNLAKQPEAMTHPDGMQIKITRQEIGQMVGCSRETVGRIIKMLEDQNLIHAHGKTIVVYGAR

SEQ ID NO: 2025 - DNA, 1275 bp, Haemophilus influenzae
ttggaacgacttaatttcagatcaacgttggaaactgaatcaccgaaatctcgcagatattcaaagccgttggctagatattcaggcagcaaaaaaatgattgattgtcgatactatcaacaaaatgaatgtcgttcttgccaatggcttgaaataccttatagtcagcagctaactgaaaaacaatatcatttaaagcagcaactgatttctattaattacgatgaagctcaatgggtggctccttttcaatctaatgaacaaggctttcgtaataaagctaaaatggttgttagtggtagtgttgaacgcccaatacttggcattttaaaaaatcctaatgatccacaaagtgcgattgatttgtgtgattgtcctctttatcctacacatttttcagtaattttttcaattctcaaagattttattggtcgcgcaggtttagtaccttataacattgctaaacaaaaaggcgagcttaaatatattttgctgacagaaagtatcgcgacggaaaaattgatgttgcgttttgtgttacgtacagaaaataaattgccattaattcgtcgagaattgcccaaattattggaaaaattaccgcacttagaagtgattagtattaatttgcaaccacagcacgcggctattttagagggcgaacaagaaatttttctgacagaacaacaatttttgcctgaaaatttcaacggtattccactctttattcgtccacaaggcttctttcaaactaaccctaaagtggctgcaggtttatatgcaactgctcaacaatgggtggctgaattccctatttataacctgtgggatttattttgtggcgtagggggatttggcttacattgtgctaaagcgttgcaggaaaaatggggaaaacccattaaattaacaggaattgaaatttcttcctctgctattttggcagccagtcattctgcgaaaatattaggtttagaacatgtaaatttccaatctctaaatgcagcaagcgtgattgaaaataaaaatgaaaataagccagatcttgtgattgtaaatccgccgcgtcgtggaattggaaaggaattaagtgaatttctcaaccaaattcaaccgcactttatcttgtattccagctgtaatgccatgacaatgggtaaagatttacagcatctaacttgttataaaccattgaaaattcaactttttgatatgtttccgcaaacatctcactatgaagtattagttttactagaaagaaaaaagattaattaa

SEQ ID NO: 2026 - protein, 424 aa, Haemophilus influenzae
MERLNFRSTLETESPKSRRYSKPLARYSGSKKMIDCRYYQQNECRSCQWLEIPYSQQLTEKQYHLKQQLISINYDEAQWVAPFQSNEQGFRNKAKMVVSGSVERPILGILKNPNDPQSAIDLCDCPLYPTHFSVIFSILKDFIGRAGLVPYNIAKQKGELKYILLTESIATEKLMLRFVLRTENKLPLIRRELPKLLEKLPHLEVISINLQPQHAAILEGEQEIFLTEQQFLPENFNGIPLFIRPQGFFQTNPKVAAGLYATAQQWVAEFPIYNLWDLFCGVGGFGLHCAKALQEKWGKPIKLTGIEISSSAILAASHSAKILGLEHVNFQSLNAASVIENKNENKPDLVIVNPPRRGIGKELSEFLNQIQPHFILYSSCNAMTMGKDLQHLTCYKPLKIQLFDMFPQTSHYEVLVLLERKKIN

SEQ ID NO: 2027 - DNA, 1053 bp, Haemophilus influenzae
atgagctcgttgttaattgatttaaacggaaaagagttggaacaagaggaagttgagttactttctcaccctcttgttgcaggattaattttatttactcgaaattttgaaaacagagaacaaattcaagaattaattcgttctgttcgccaacgagtgaaaaagcctttattgattacggtggatcaagaaggtggacgagttcaacgtttccgtgatggatttacaatgttgccttcaatgcaggcttttcaagaaacactgtcagcaactgaacaagtgagttttgctaaagaagcaggttggcaaatggcagcagaaatgattgccttggatattgacttgagttttgctcctgtgttggatttggggcatgaatgtcgagcgattggtgatcgcagtttttcatctgatgtaaaaagtgcggtaaatttagccaccgcttttattgatggtatgcatcaagcaggtatggcatctacaggtaaacattttcctggtcatggtcatgtattagccgattctcatttagaaacgccttatgatgatcgttcaaaagacgaaatttttagttgcgatctccaacctttccaacagttaatttcacaaaataaactcgatgcgattatgcctgctcacgtgatttattctcaatgcgatagtcagcctgcaagtggttcaaaatattggttgaaagaaattttacgcaagaaattaaatttccaaggtacaattttttccgatgatctaggaatgaaaggcgcgggagtaatggggaattttgtagagcgtagtaaaaaagcactcaatgcaggttgcgatcttttattactgtgtaatgaacgtgagggcgtaattcaagtattagataatctaaaacttactgaaaatgaaccgcactttatggctcgtcaagttcgcttacaaagtttattcaaacgtagagtgattaattggaacgacttaatttcagatcaacgttggaaactgaatcaccgaaatctcgcagatattcaaagccgttggctagatattcaggcagcaaaaaaatga

SEQ ID NO: 2028 - protein, 350 aa, Haemophilus influenzae
MSSLLIDLNGKELEQEEVELLSHPLVAGLILFTRNFENREQIQELIRSVRQRVKKPLLITVDQEGGRVQRFRDGFTMLPSMQAFQETLSATEQVSFAKEAGWQMAAEMIALDIDLSFAPVLDLGHECRAIGDRSFSSDVKSAVNLATAFIDGMHQAGMASTGKHFPGHGHVLADSHLETPYDDRSKDEIFSCDLQPFQQLISQNKLDAIMPAHVIYSQCDSQPASGSKYWLKEILRKKLNFQGTIFSDDLGMKGAGVMGNFVERSKKALNAGCDLLLLCNEREGVIQVLDNLKLTENEPHFMARQVRLQSLFKRRVINWNDLISDQRWKLNHRNLADIQSRWLDIQAAKK

SEQ ID NO: 2029 - DNA, 351 bp, Haemophilus influenzae
atgaaaaaatattttctaattttagcgagctttatgctcgtggcttgttcaagttcagaacaaaacttaacttattcaacaaagccgattttgaatattacgtcgtctctttcgcctttgattcaagttgaaacgactcaaaaatcagcggttataaaaaataaaagtcagcaacttttgaatataagttaccatttgtattggtacgatcatttaggggtaacccaaatttgggaaaatcagcaagaaagctattccgctcaatttttgctaaaaccacaagagcaaaaatcaattgatttaactaaacctactgtagaaagtaaaaattatcgcctttatttaaaataa

SEQ ID NO: 2030 - protein, 116 aa, Haemophilus influenzae
MKKYFLILASFMLVACSSSEQNLTYSTKPILNITSSLSPLIQVETTQKSAVIKNKSQQLLNISYHLYWYDHLGVTQIWENQQESYSAQFLLKPQEQKSIDLTKPTVESKNYRLYLK

SEQ ID NO: 2031 - DNA, 351 bp, Haemophilus influenzae
atggcagaagaaacaatttttagtaaaattatccgtaaagaaattccggcaaatatcgtctatcaagatgaattagtcactgcatttcgtgatatttcccctcaagctaaaacacatattttgattattccaaataaagtcattcccacagtgaatgatgtgacggagcaagatgaagtagcactaggtcgattatttagcgtagcggctaaactcgctaaagaagaaggtgttgcggaagatggttaccgcctaattgtgaattgtaataaacatggtgggcaagaagtattccatttacatatgcatttagttggtggagaacctttaggtagaatgttagcgaaataa

SEQ ID NO: 2032 - protein, 116 aa, Haemophilus influenzae
MAEETIFSKIIRKEIPANIVYQDELVTAFRDISPQAKTHILIIPNKVIPTVNDVTEQDEVALGRLFSVAAKLAKEEGVAEDGYRLIVNCNKHGGQEVFHLHMHLVGGEPLGRMLAK

SEQ ID NO: 2033 - DNA, 2826 bp, Haemophilus influenzae
atgacagtcgattacaaaaacactcttaacctaccggaaaccagctttccaatgcgtggcgatttagctaagcgcgaacctgatatgttgaaaaattggtacgagaaaaatctttaccaaaaaattcgtaaagcgagtaagggcaaaaaatcttttattctgcatgatggccctccttatgcgaatggtaacattcatattggtcacgctgtaaacaagattctgaaagatattattattaaatccaaaacggcgttaggttttgattcgccttatatcccgggttgggactgccacggcttgccaattgaattaaaagtagaaggtttagtgggtaaaccaaacgagaaaatttctgcggcagaatttcgtcaaaaatgtcgtgaatacgcggcggaacaggtcgagggtcaaaagaaagactttatccgtttaggtgtgttgggcgattgggataatccatatctcacgatgaatttcgataccgaagcgaatattatccgcactttaggtaaagtgattgaaaatggtcatttgtataaaggctcaaaaccagttcactggtgtttggattgcggttcttctttagcagaagcagaagtggaatatgaagacaaagtttctccgtcaatttacgttcgtttccctgcggaaagtgcggatgaaattgaagctaaattttctgcacaaggtagaggacaaggtaaattatcagccatcatttggactaccacaccttggacgatgccgtctaaccgtgcgattgcggtgaatgcagacttagaatacaacttagtccaacttggcgatgagcgtgtaattttagctgctgaattagtggaatctgtggcgaaagccgtgggcgtagaacaagttaaaattttaggttcagtaaaaggtgctgatcttgaattaagccgtttccatcatccattctatgattttactgtgccagtgattttaggcgatcacgtaaccactgatggcggtacgggtttagtacataccgcacctgatcacggtttagacgactttatcgtgggtaaacaatatgatttaccaatggcgggtcttgtatcgaatgatggtaaatttatttcaacgaccgaattctttgctggcaaaggtgtatttgaagcaaatccgcttgtgatagaaaaattacaagaagtaggtaacttattaaaagttgaaaaaatcaaacacagctatccacactgctggcgtcacaaaaccccaattattttccgtgcaacaccgcaatggtttatcggcatggaaacgcaaggtttacgccaacaagcattaggcgaaatcaaacaagttcgctggattccagattggggtcaagcacgtatcgagaaaatggttgaaaaccgcccagactggtgtatttcacgccaacgtacttggggtgtgccgatgaccttgttcgtgcataaagaaaccgaagaacttcatccgcgtaccttggatctacttgaagaagtggcgaaacgtgtagaaagagcgggtattcaagcgtggtgggatttagacgaaaaagaattattaggggcggatgcagaaacctatcgcaaagtgccagatacccttgatgtatggttcgattcaggatcaacctattcttctgttgttgcaaatcgcccagaatttaatggtcaagatattgatatgtatttagaaggttccgaccaacaccgtggttggtttatgtcttctttaatgctttctacggcaacagatagcaaagcaccatacaagcaagtattaacccatggtttcactgtggatgggcaaggccgtaagatgtcaaaatctatcggtaacatcgtgacaccacaagaagtcatggataaattcggtggtgatattttacgtttatgggttgcttctactgattatacgggtgaaatgaccgtttctgatgagatcttaaaacgtgcagcggacagctatcgtcgtattcgtaacaccgctcgtttcttattagcaaacttgaatggttttgatccaaaacgtgatttagtcaaaccagaagaaatgattagcctagatcgttgggcggtagcttgtgcattagatgcacaaaatgaaattaaagatgcatacgataactatcaattccacactgtggtacaacgtttaatgcgtttctgttcggtagaaatggggtcattctatttagatattatcaaagaccgtcaatatacaaccaaagcagacagccttgcgcgtcgtagttgccaaactgcgttatggcatattgctgaagcattagttcgttggatggcaccgatcttatctttcactgccgatgaaatttggcaacacttgccacaaactgaaagtgctcgtgcggaattcgtatttactgaagaattctatcaaggcttatttggtttaggcgaggatgaaaaattagatgatgcttactggcaacaactgattaaagttcgttcagaagtaaaccgtgtattagaaatttctcgtaacaataaagaaataggcggcggtttagaagcagaagtgaccgtttatgctaatgacgaatatcgtgcattgttagcacaattaggcaatgaattacgtttcgtattaattacctcaaaagtagatgtaaaatctttatcggaaaaacctgctgatttagcggacagcgaattagagggtattgcagtaagcgtaacacgttctaacgcagaaaaatgccctcgttgctggcattattctgacgaaattggggtaagcccagaacatccaacactttgtgcacgttgtgtagaaaatgtagtgggcaatggagaagttcgacactttgcataa

SEQ ID NO: 2034 - protein, 941 aa, Haemophilus influenzae
MTVDYKNTLNLPETSFPMRGDLAKREPDMLKNWYEKNLYQKIRKASKGKKSFILHDGPPYANGNIHIGHAVNKILKDIIIKSKTALGFDSPYIPGWDCHGLPIELKVEGLVGKPNEKISAAEFRQKCREYAAEQVEGQKKDFIRLGVLGDWDNPYLTMNFDTEANIIRTLGKVIENGHLYKGSKPVHWCLDCGSSLAEAEVEYEDKVSPSIYVRFPAESADEIEAKFSAQGRGQGKLSAIIWTTTPWTMPSNRAIAVNADLEYNLVQLGDERVILAAELVESVAKAVGVEQVKILGSVKGADLELSRFHHPFYDFTVPVILGDHVTTDGGTGLVHTAPDHGLDDFIVGKQYDLPMAGLVSNDGKFISTTEFFAGKGVFEANPLVIEKLQEVGNLLKVEKIKHSYPHCWRHKTPIIFRATPQWFIGMETQGLRQQALGEIKQVRWIPDWGQARIEKMVENRPDWCISRQRTWGVPMTLFVHKETEELHPRTLDLLEEVAKRVERAGIQAWWDLDEKELLGADAETYRKVPDTLDVWFDSGSTYSSVVANRPEFNGQDIDMYLEGSDQHRGWFMSSLMLSTATDSKAPYKQVLTHGFTVDGQGRKMSKSIGNIVTPQEVMDKFGGDILRLWVASTDYTGEMTVSDEILKRAADSYRRIRNTARFLLANLNGFDPKRDLVKPEEMISLDRWAVACALDAQNEIKDAYDNYQFHTVVQRLMRFCSVEMGSFYLDIIKDRQYTTKADSLARRSCQTALWHIAEALVRWMAPILSFTADEIWQHLPQTESARAEFVFTEEFYQGLFGLGEDEKLDDAYWQQLIKVRSEVNRVLEISRNNKEIGGGLEAEVTVYANDEYRALLAQLGNELRFVLITSKVDVKSLSEKPADLADSELEGIAVSVTRSNAEKCPRCWHYSDEIGVSPEHPTLCARCVENVVGNGEVRHFA

SEQ ID NO: 2035 - DNA, 927 bp, Haemophilus influenzae
atgcaattaattcgtgggcttcataatgcaaatcgtgttttacaaggttgtgcactaacgatcggcaactttgatggcgtgcatttagggcatcaaaccgtccttcgccatttgcgtcaaaaagctgacgaattaaatttacccatggcggtattgttatttgaatcacagccgcgtgaatattttatggggaaaaatgcaccagcccgtttaatgcgtttgcgtgacaaaatttattatctcgaaaaggctaaggttgatgtcgtaattgtggcgaaatttgaccgcacttttgccgagcaaccagccgatgtttttattgaacaaacgcttgttaatcatctacatgtgaaatttttaagcattggcgatgatttcaaattcggctcaaaacgccaaggtaattttgccatgttgcaagcagctagtaagcgttttggttttattgttgaagataaccgtagtttttgtctagatgcacagcgaattagtagcactgcgattcgcgaagcgttagcgaatgatgacttacaacttgcagaaaatttactcggcaagccttatcgtattttcgggcgtgtgattcatgggaataaattaggcagaacaataggatttccaacggcaaatattcgtttgcatagacaagtaaatccaatcaaaggcgtttatgccgtaaaagtgcggttaaaatcgggggagatttttaacggcgtggcaaacatgggaaaacgcccaactataaatggattaatgcaattattagaagtccatttatttgatttttctcagaatatttatggccaaatggtggaagtggaattctgccacaagattagaaacgagattaaattcccctcttttgatgatttgaaagtgcaaattgagaaagacgtagaaactgcgaaagcgttttttaacagttaa

SEQ ID NO: 2036 - protein, 308 aa, Haemophilus influenzae
MQLIRGLHNANRVLQGCALTIGNFDGVHLGHQTVLRHLRQKADELNLPMAVLLFESQPREYFMGKNAPARLMRLRDKIYYLEKAKVDVVIVAKFDRTFAEQPADVFIEQTLVNHLHVKFLSIGDDFKFGSKRQGNFAMLQAASKRFGFIVEDNRSFCLDAQRISSTAIREALANDDLQLAENLLGKPYRIFGRVIHGNKLGRTIGFPTANIRLHRQVNPIKGVYAVKVRLKSGEIFNGVANMGKRPTINGLMQLLEVHLFDFSQNIYGQMVEVEFCHKIRNEIKFPSFDDLKVQIEKDVETAKAFFNS

SEQ ID NO: 2037 - DNA, 1503 bp, Haemophilus influenzae
gtgcgcgatgtagttatcgctcatctcattggggctggtgctgtggcggacgtttttttatttgctaatcgtatcccaaattttcttcgccgtttatttgctgaaggggctttttcacaggcttttgtccctgttctcgcagaatatcaacaatctggtgatattaataaaactcgtgaatttattggaaaagtttctggtacccttgggggattggtcagtattgttacgatccttgcgatgattggttcacctgtcgttgccgctttatttgggatgggctggtttaccgattggatgaatgatggccctgacgcacataaatttgaacaagcctctcttcttcttaaaataacttttccttatttatggtttgttacttttgtggcattttctggcgctgtgcttaacacgattggaaaattcggcgtgatgtccttttcacccgtgttattaaatatagcgatgattgccaccgcacttttcctcgcaccacaaatggataacccagatcttgcgctcgctatcgggatttttcttggcggattattacagttcttattccaaattccatttatgaaacaagccggtttactggtgaaacccaaatgggcttggcgggatgaaggcgtaaccaaaattcgtaaattaatgatccctgcgttatttggtgtatcggtaagtcaaattaatcttttgctggatacagtgattgcgagtttcttaatgacgggctctattagctggctgtattattccgaccgcttattggaatttcctcttggtttatttggcattgcgatttctaccgtaattttaccaacgcttgctcgccaccacgttaatcgtgaaggcgattcagctaaaagtgcggttgattttcgtaatacaatggattggggcgtgcgaatgattttattacttggcgttcctgcagccattggtattgctgtattggctcaaccgatgttacttacgctctttatgcgtggaaattttatgctaaatgatgtttatgccgcctcttattctttatgggcgtttaatgcgggtttgcttagctttatgttgattaaaatcctcgccaatggctattacgctcgccaagataccaaaaccccagtaaaaattggcattattgccatggtgagtaatatgggctttaatctattggcgattcctttcagctatgttggtttagctattgcttcagcaatgtccgcaactcttaacgcctatttgctctatcgcggcttagccaaagcggatgtgtaccatttttcacgtaaaagtgcggtcttttttgtcaaagttttattggctgcaatcgcaatgggtgcggcagtttggtattacgtgcctgaaatcaaccaatgggcaaaaatggatttctttatgcgtgtttattggcttgtttggttgattgtcttagccgcaatagtttatggtgcaacgttgattttattaggcgttcgcaagcaccatttgctgacaaaaaactaa

SEQ ID NO: 2038 - protein, 500 aa, Haemophilus influenzae
MRDVVIAHLIGAGAVADVFLFANRIPNFLRRLFAEGAFSQAFVPVLAEYQQSGDINKTREFIGKVSGTLGGLVSIVTILAMIGSPVVAALFGMGWFTDWMNDGPDAHKFEQASLLLKITFPYLWFVTFVAFSGAVLNTIGKFGVMSFSPVLLNIAMIATALFLAPQMDNPDLALAIGIFLGGLLQFLFQIPFMKQAGLLVKPKWAWRDEGVTKIRKLMIPALFGVSVSQINLLLDTVIASFLMTGSISWLYYSDRLLEFPLGLFGIAISTVILPTLARHHVNREGDSAKSAVDFRNTMDWGVRMILLLGVPAAIGIAVLAQPMLLTLFMRGNFMLNDVYAASYSLWAFNAGLLSFMLIKILANGYYARQDTKTPVKIGIIAMVSNMGFNLLAIPFSYVGLAIASAMSATLNAYLLYRGLAKADVYHFSRKSAVFFVKVLLAAIAMGAAVWYYVPEINQWAKMDFFMRVYWLVWLIVLAAIVYGATLILLGVRKHHLLTKN

SEQ ID NO: 2039 - DNA, 264 bp, Haemophilus influenzae
ttggctaatatcaagtcagcaaaaaaacgcgcggttcaatctgaaaaacgtcgccaacacaacgcaagccaacgctctatgatgcgtacttatatcaaaaaagtatatgctcaagtagcagcaggcgaaaaatcagcagctgaagcagcattcgttgaaatgcaaaaagttgtagaccgtatggcttctaaaggcttaatccacgctaacaaagcagcaaaccacaaatctaaattagctgctcaaatcaaaaaattagcgtaa

SEQ ID NO: 2040 - protein, 87 aa, Haemophilus influenzae
MANIKSAKKRAVQSEKRRQHNASQRSMMRTYIKKVYAQVAAGEKSAAEAAFVEMQKVVDRMASKGLIHANKAANHKSKLAAQIKKLA

SEQ ID NO: 2041 - DNA, 543 bp, Haemophilus influenzae
atggcagcattgctgtctggctgttcaatgtttgatagccaacaatccgcaattccagcggaatttgctggggctgattaccaactttccgatcaacatgcaaaacaatgggcgattgcaagtaagcaagtagaacaatgcgtttacccaaatttaactcgaattttgcaacagcatttttcaaaagaagatagctatattcactcacaatatgtctttttctatccgttggaaaaaattattggcgaacaatatgtgaagattatccaagccgatgaaaaatcaatgaattatgcaagctatcagtttaaaaaattccgtaccagagtgggcaatgttgaacctttaactaaacagtcttgtttgaagttgcgtaacgaagcgcgcgatgatttggctgtcgtgaaaggtcaatataaaaatggcatggtggaagtgcaaaaaaatgaagatggcacaccaaaaaattctgatggcattgcaaccaatcaaaataaattcttctttgatattatcaaatggggatcgatgttgttactttag

SEQ ID NO: 2042 - protein, 180 aa, Haemophilus influenzae
MAALLSGCSMFDSQQSAIPAEFAGADYQLSDQHAKQWAIASKQVEQCVYPNLTRILQQHFSKEDSYIHSQYVFFYPLEKIIGEQYVKIIQADEKSMNYASYQFKKFRTRVGNVEPLTKQSCLKLRNEARDDLAVVKGQYKNGMVEVQKNEDGTPKNSDGIATNQNKFFFDIIKWGSMLLL

SEQ ID NO: 2043 - DNA, 858 bp, Haemophilus influenzae
atgcaaaatccaaaagatgatgtgttatatgcgcctgttgaatgggtcgatcacagtgaaggctatagcgatattcgctatcataaatccactgatggtattgcaaaaattaccattaaccgcccagaagttcgtaatgcgttccgcccacaaacagtgaaagaaatgatcactgcattttctgatgcacgtttcgatgaaaacattggtgtcattgtattaactggcgaaggcgaaaaagcattctgttctggtggtgaccaaaaagtgcgtggcgattacggcggttacaaagatgacagcggcgtacatcacttaaatgtattagatttccaacgcgatattcgttcttgtccaaaaccagttgtagcaatggtggctggttatgcaattggtggtggtcatgtattacatatgctttgcgacttaaccattgctgctgaaaatgccattttcggtcaaactgggccaaaagtcggttcattcgatggtggttggggtgcaagctatatggctcgtttagtggggcagaaaaaagcgcgtgaaatttggttcttatgccgtcaatataatgcacaagaagcattagacatgggcttagtcaatacggttgtgccttacgctgatcttgaaaaagaaaccgtacgctggtgtcgtgaaatgttacgcaatagcccaatcgcgatccgttgtttgaaagcggcattaaatgcggattgtgatggccaagcaggtcttcaagaattagcgggtaacgcaacaatgttgttctacatgactgaagaaggtcaagaaggccgcaatgcgtttaacgaaaaacgcgccccagacttcagcaaattcagacgtaacccttaa

SEQ ID NO: 2044 - protein, 285 aa, Haemophilus influenzae
MQNPKDDVLYAPVEWVDHSEGYSDIRYHKSTDGIAKITINRPEVRNAFRPQTVKEMITAFSDARFDENIGVIVLTGEGEKAFCSGGDQKVRGDYGGYKDDSGVHHLNVLDFQRDIRSCPKPVVAMVAGYAIGGGHVLHMLCDLTIAAENAIFGQTGPKVGSFDGGWGASYMARLVGQKKAREIWFLCRQYNAQEALDMGLVNTVVPYADLEKETVRWCREMLRNSPIAIRCLKAALNADCDGQAGLQELAGNATMLFYMTEEGQEGRNAFNEKRAPDFSKFRRNP

SEQ ID NO: 2045 - DNA, 990 bp, Haemophilus influenzae
atggctgaaaaatcatttaatctttaccgttattctatccccgttgatagccaacttattctgcgtgatcgttttttaaaacgccgtgaaggtttaatcgtaagagtgcgttgcagccgagacggttggggagaaatcgctccgctacctggttttagcgaagaaaccctagaccaagctcaagaacaagcaattgaatggctaacgacatggtgcaatgcaagctgtgatgcacctcgcgtaccattagatggcacctatccctccgttgcttttggtatcagttgcgcaatggatgaaatgaaaggttatttacaagctgaaggcaattatcatacggcaccactttgttatggcgatccagatgaattgtacgccaaacttgcgagtatggaaggcgaaaaggtggcaaagatgaaagtgggcatatacgaagccaatcgcgatggattaattgccgatatgtttttagaagccattcccgatttacaattacggcttgatgcaaaccgccattggtcgttagaaaaagccttacaatttgccgctaaagtcaaaccgcaacatagaaaacgtattcaatttttagaagaaccttgtaaaacacaagaactcagccgtgaatttgcagctcaaaccgatattgcaattgcatgggatgaatccgtgcgagagcctaatttttgcttggaaaaagaaccgcacttatcggctgtcgtcatcaaacccactttaattggttcaattcaaggttgtactgagctcattaaccaagcacattcgttaggcctaaaagcggttataagttcaagtatcgaaagcagtttagggctctctcagctcgcgcgaattgcacaacaatacactccgaatgtgactccaggcttagatactttagatttgatggaatatcaagtactacgcgcttggcctagttctgatttacctattgttgatttagaatctgaatttatcactaaaattatctga

SEQ ID NO: 2046 - protein, 329 aa, Haemophilus influenzae
MAEKSFNLYRYSIPVDSQLILRDRFLKRREGLIVRVRCSRDGWGEIAPLPGFSEETLDQAQEQAIEWLTTWCNASCDAPRVPLDGTYPSVAFGISCAMDEMKGYLQAEGNYHTAPLCYGDPDELYAKLASMEGEKVAKMKVGIYEANRDGLIADMFLEAIPDLQLRLDANRHWSLEKALQFAAKVKPQHRKRIQFLEEPCKTQELSREFAAQTDIAIAWDESVREPNFCLEKEPHLSAVVIKPTLIGSIQGCTELINQAHSLGLKAVISSSIESSLGLSQLARIAQQYTPNVTPGLDTLDLMEYQVLRAWPSSDLPIVDLESEFITKII

SEQ ID NO: 2047 - DNA, 450 bp, Haemophilus influenzae
atgtcgcaaacacacagaattttgctgttaaatggcccgaacttaaatatgttaggggctcgcgagccaaaacattatggcagtatttctcttgaatccattgaagagaaaatacaaactttagccactcaacacaatgtaaaagtggaatgttttcaagccaatagtgaagaaaaattaattaataagatccacgaaagttttcaacaagtcgattttattttaattaatcctgcggcttacacccataccagtgtagcattgcgcgatgcacttttagctgtctcaattccttttgtagagattcatttatctaacgtgcataaacgtgaaccatttcgtcatcattcttattttagcgatgtggctgaaggcgttatttgcggtttgggcgcaaaaggttacgagtttgcctttttatttgctatggattaccttgctaaaaaatag

SEQ ID NO: 2048 - protein, 149 aa, Haemophilus influenzae
MSQTHRILLLNGPNLNMLGAREPKHYGSISLESIEEKIQTLATQHNVKVECFQANSEEKLINKIHESFQQVDFILINPAAYTHTSVALRDALLAVSIPFVEIHLSNVHKREPFRHHSYFSDVAEGVICGLGAKGYEFAFLFAMDYLAKK

SEQ ID NO: 2049 - DNA, 468 bp, Haemophilus influenzae
atggacattcgtaaaatcaaaaaattaatcgaattagtagaagaatcgggcattactgaattagaagtgcaagaagaagagggtacagtacgtattagccgtgctgcgccagtaattgctccagcagccgttcaatatgctgcagcaccagtagtagcaccgactcctgccgctgcaccagctcaagttccagcagctgcgacatccgcaccagccgcatcggatgaattatcaggccatcttgtacgttctccaatggtgggaaccttctatcgcagcccaagcccagaagcaaaagcattcgttgaagtggggcaatcagtgaaagttggcgatgcgctttgtatcgttgaagcaatgaaaatgatgaaccgcattgaagcggacaaagctggcgtagtaaaagcaattcttatcaacgacggtaacgccgttgaatttgacgaaccattaatcgttattgaataa

SEQ ID NO: 2050 - protein, 155 aa, Haemophilus influenzae
MDIRKIKKLIELVEESGITELEVQEEEGTVRISRAAPVIAPAAVQYAAAPVVAPTPAAAPAQVPAAATSAPAASDELSGHLVRSPMVGTFYRSPSPEAKAFVEVGQSVKVGDALCIVEAMKMMNRIEADKAGVVKAILINDGNAVEFDEPLIVIE

SEQ ID NO: 2051 - DNA, 1347 bp, Haemophilus influenzae
atgttagaaaaagttgtgattgctaaccgcggtgaaattgcactacgcattttacgtgcttgtaaagaattaggtattaaaactgtggcggttcactccactgctgatcgtgatttaaaacacgttttactcgctgatgaaaccatttgtatcggtccagcaccttccgcaaaaagttatttaaatattccagctatcattgctgccgccgaagtaacaggtgcggatgcaattcatcctggatacggcttcttatctgaaaacgctgactttgctgaacaagttgaacgttcaggtttcactttcatcggcccaacagcagatgttattcgtttaatgggcgataaagtttcagctattaaagcgatgaaaaaagcaggcgtgccttgtgtaccaggttcggatggccctgtaagtaatgatattgctaaaaataaagaaattgctaaacgtattggctatccaatcatcatcaaagcctcaggcggcggcggtggccgaggaatgcgtgttgttcgtagcgaagacgcattagaagaatctattgcgatgaccaaagcagaagcgaaagcggcattcaataatgatatggtttatatggaaaaatacttagaaaatccacgtcacgtggaaattcaagtattagcagatacccatggaaatgcggtttatttggctgaacgcgactgctcaatgcagcgtcgtcaccaaaaagttgtggaagaagcaccagctccaggtattacagaagaagttcgccgcgatattggctctcgctgtgcaaatgcttgtgtagaaatcggctatcgcggagcgggaacctttgaattcttatatgaaaatggcgaattctactttattgaaatgaatacccgtatccaagtagaacacccagtaacagaaatgatcacaggtgtagatttagtgaaagagcaattgcgtattgcggcaggcttacaactttcttacaaacaagaagatattaaagtgaaaggccatgcgatggaatgccgtatcaatgcggaagacccaaaaacattcttaccatctccaggtaaagttgcacacttgcattcacctggtggtttaggcgttcgttgggattctcatgtatatggtggttataccgttcctccgcattatgattcgatgatcgcaaaattaatcacatacggtgatactcgtgatgtagcaatccgtcgtatgcaaaatgcgttatcagagactatcattgatggtatcaaaacaaatatccctcttcatgaacttattcttgaagatgaaaacttccaaaaaggtggcgccaatatccactatttagagaagaaattaggaatgtatgattaa

SEQ ID NO: 2052 - protein, 448 aa, Haemophilus influenzae
MLEKVVIANRGEIALRILRACKELGIKTVAVHSTADRDLKHVLLADETICIGPAPSAKSYLNIPAIIAAAEVTGADAIHPGYGFLSENADFAEQVERSGFTFIGPTADVIRLMGDKVSAIKAMKKAGVPCVPGSDGPVSNDIAKNKEIAKRIGYPIIIKASGGGGGRGMRVVRSEDALEESIAMTKAEAKAAFNNDMVYMEKYLENPRHVEIQVLADTHGNAVYLAERDCSMQRRHQKVVEEAPAPGITEEVRRDIGSRCANACVEIGYRGAGTFEFLYENGEFYFIEMNTRIQVEHPVTEMITGVDLVKEQLRIAAGLQLSYKQEDIKVKGHAMECRINAEDPKTFLPSPGKVAHLHSPGGLGVRWDSHVYGGYTVPPHYDSMIAKLITYGDTRDVAIRRMQNALSETIIDGIKTNIPLHELILEDENFQKGGANIHYLEKKLGMYD

SEQ ID NO: 2053 - DNA, 891 bp, Haemophilus influenzae
atgaaacttaatctttcgaaattcagcttaactattcttacaacggtaatgctggcttcctgtggaagtggcggcggtgataatactcaattagtaagtccaccaaaaccagctgagcaatccaaaccggctgagcaatcgaaaccagctgatcaatcaaaatcagttgaacagtcaattcttggaatgcctgaacgcttgccaactaataccggtttagcattttctataaaaacagaagatgagggaaatattaatacaattaagaatgaacaggagctcattgctactaataattttgctagtatcaatgttgatggcaaaaatatccctattgattttaaattagaaccaagtcaaggttggacaaaagaaggtgcgtttatcgaagagctgaatttagcaccacatatttgttgtggaaaatacacagatgtccgctttggtgcaattgcaagtcattcatttgggcaagatgatattcttttttataatggaaatccttcaaacagtgtgccagaatcaggagaagttacttacaagggtgaaagtataatggcggataaaggcaatagcgtatttggtggttatagaaaaggcacctctgaatttaaggttaattttggtgacaaaaaattatcaggaagtttaaacgttgatagtcctaaatatgatgttgaatctggagaaagtaaatttaataaagtcaaagttgacattaatgccgatatttcaggcaataaattttacggcagtgcaaaatcttcctcttttgtttcagaagctgtatcagagggcaagttttatggggatggagctaaagaactaggtggaatggtaaaagctaaagataattcttgggttggagcctacggtgcaaaagcacagtaa

SEQ ID NO: 2054 - protein, 296 aa, Haemophilus influenzae
MKLNLSKFSLTILTTVMLASCGSGGGDNTQLVSPPKPAEQSKPAEQSKPADQSKSVEQSILGMPERLPTNTGLAFSIKTEDEGNINTIKNEQELIATNNFASINVDGKNIPIDFKLEPSQGWTKEGAFIEELNLAPHICCGKYTDVRFGAIASHSFGQDDILFYNGNPSNSVPESGEVTYKGESIMADKGNSVFGGYRKGTSEFKVNFGDKKLSGSLNVDSPKYDVESGESKFNKVKVDINADISGNKFYGSAKSSSFVSEAVSEGKFYGDGAKELGGMVKAKDNSWVGAYGAKAQ

SEQ ID NO: 2055 - DNA, 1446 bp, Haemophilus influenzae
atgagtatacaaactaaatttattttatttctcagctcatcattatttcttaccccatattcggttgctacagaaaaatctccacaaccacatgatgggcgtttagatgagcagctacatttggccaaaccaaatttaccacaaaaaccaaccgcacttttgaccaataataatccatcaaagttatctattacaaaagaagaattagccaaacacccagacttgattattcgcggtcttatccctgccgtattacaaaataatggtgaggcagtacaacttttattaccgctatatcagcctttacctaaaaaagatccgttcttgttagaatgggctgaagcgattgatttacgagaaaaaggacatttttctgattctgttaaagcctaccgacacttattttcacaaaaaactgatcttttacctttgcgctatcaattagctcaagccttgtttctaaataatgataatgaggcggcaaaagatcaatttcaaaaattaagagcagagcaagtttcccctgattctgtaaaaataattgaacaatatctttctgccttaaatcaacgagatcaatggaaaatccaaggtggatttagttttttaaatgaaagtaatattaataatgcgccaaaagccggcacaaaaattggcaactggacagcttgggaaaaagaaagtgccagaggattttcgtattttgggaatgctgaaaaaaaatggtcattacctcacaaccactttacaaaattgtccttggaaggtagtgggaaatattattgggataacaagaaatataatgaatttaacgcgagagctggtgcaggtcttggataccaaactgcgcgatttgaagtctccttgatgccatttactgaaaaacgttggtatgtgggcggctcatcaggcggaaatgcgatgaaacaatactctaaaaattcaggtgctagattggatttatccaattggctaaatgaaaaatggcaaatttcgaccgcacttgagtatggtgaacaacgctatgaaactcgtaaacatctaaatggaaataactatctagcttccgctacgctactttacctggcgaaaagtggacagtattggtttggcggagctgattataatcgcgaaaacactcgagatttagataatgcttatcaacgaaaaaatgtccgattaggatggggacaagaatggaaagctggtatatcaactcgtttaatcctgaattatgcacgacgtgcctataaagaaaaagatcttatcggtattcgtcaaaaaaataaggaatatgcttcagtcttcactatctggcatagaaactttcatatttggggaattacaccgaaattatcttggtcgtatcaaaaggtaacaagtaatcatcctttttatgaatatgataaaaatcgaatttacgtagaaatcagcaaaacattttga

SEQ ID NO: 2056 - protein, 481 aa, Haemophilus influenzae
MSIQTKFILFLSSSLFLTPYSVATEKSPQPHDGRLDEQLHLAKPNLPQKPTALLTNNNPSKLSITKEELAKHPDLIIRGLIPAVLQNNGEAVQLLLPLYQPLPKKDPFLLEWAEAIDLREKGHFSDSVKAYRHLFSQKTDLLPLRYQLAQALFLNNDNEAAKDQFQKLRAEQVSPDSVKIIEQYLSALNQRDQWKIQGGFSFLNESNINNAPKAGTKIGNWTAWEKESARGFSYFGNAEKKWSLPHNHFTKLSLEGSGKYYWDNKKYNEFNARAGAGLGYQTARFEVSLMPFTEKRWYVGGSSGGNAMKQYSKNSGARLDLSNWLNEKWQISTALEYGEQRYETRKHLNGNNYLASATLLYLAKSGQYWFGGADYNRENTRDLDNAYQRKNVRLGWGQEWKAGISTRLILNYARRAYKEKDLIGIRQKNKEYASVFTIWHRNFHIWGITPKLSWSYQKVTSNHPFYEYDKNRIYVEISKTF

SEQ ID NO: 2057 - DNA, 258 bp, Haemophilus influenzae
atgacattaaaacaacgttatcaacaagctggtaaagaagccagttgggcattgagcctatctattttatatgtaataggttggtgcttatgtgcttatttgcctaaagaaactcaaggccctatcggctttcccctctggtttgaactctcttgtatttatttgcctattctgtttattgtaattggtcattggattatcaaaattatttttcaggatatttctcttgaaattaacgatcaggggaatcaaaaatga

SEQ ID NO: 2058 - protein, 85 aa, Haemophilus influenzae
MTLKQRYQQAGKEASWALSLSILYVIGWCLCAYLPKETQGPIGFPLWFELSCIYLPILFIVIGHWIIKIIFQDISLEINDQGNQK

SEQ ID NO: 2059 - DNA, 1455 bp, Haemophilus influenzae
atgaatttaggtattattcttcctttaattatttatctcacttttgtttttggtgcagcaatttttgcctatgtaaaacgtacaaaaggcgattttttaacagaatattatgtgggaaatcgatcgatgactggttttgtgctcgcaatgacaactgcatcaacttatgccagtgcaagttcttttgtcggagggcctggagctgcttataaatacggattaggttgggtattacttgcgatgattcaagtgccagtcgtatggcttgcattaggtgcattaggtaaaaaattcgcgctattatcaagagaaaccaatgctttaactattaatgatcttttcttttatcgctataaaaacaaatatttagtttggctatcaagccttgctcttcttctcgcattttttgcggctatgaccgtgcaatttattggtggtgcgcgtttattagaaacaaccatcggcatttcttatactcaagcattactcttatttgctttaacggtaggtatctatacttttatcgggggcttccgtgccgtcgtactgacggataccattcaaggtaccgtcatgatttttgggactataattctccttattggcacgatttatgccctcggtggtgtagaaagtgcggttaataaattaactgaaattgatcctgacttagtcacgccttacgggccaaatggaatgttagatttccaatttatggcttctttctggatacttgtctgtttcggggtggttggtcttccacataccgcagttcgatgtatggcatttaaagacagtaaagccttacatcgcggtatgctgattggaaccattgtactttcaattattatgttgggtatgcacttagctggtgcgcttggcagagcggttattccaaatttaacggtatcagatcaagtaattccaacattaatgataaaagtattgccgcctattgttgcggggattttcttagctgcaccgatgtctgcgattatgtccacaattgatgcacaacttattcaatcttcttctatttttgtcaaagatttatacctttctgcgaaaccagaagccgcaaaaaatgagaaaaaagtgagctatttttcatcaattattacgctgattttgaccgcacttttaatctttgccgcactcaatccaccagatatgattatttggttaaacctatttgcctttggcggactggaagccgcatttttatgggtaattgtactgggtatttactgggataaagcaaatgcttatggtgcgttaagctcaatgattatcggcttaggaagctatatcttgctcactcaacttggcataaaattatttaacttccatcaaatcgtgccatcattagtatttggattaattgcctttttagtgggtaataaattgggcgaacgtcgtattgaaaaaactcaattaaaagttaccgcactttaa

SEQ ID NO: 2060 - protein, 484 aa, Haemophilus influenzae
MNLGIILPLIIYLTFVFGAAIFAYVKRTKGDFLTEYYVGNRSMTGFVLAMTTASTYASASSFVGGPGAAYKYGLGWVLLAMIQVPVVWLALGALGKKFALLSRETNALTINDLFFYRYKNKYLVWLSSLALLLAFFAAMTVQFIGGARLLETTIGISYTQALLLFALTVGIYTFIGGFRAVVLTDTIQGTVMIFGTIILLIGTIYALGGVESAVNKLTEIDPDLVTPYGPNGMLDFQFMASFWILVCFGVVGLPHTAVRCMAFKDSKALHRGMLIGTIVLSIIMLGMHLAGALGRAVIPNLTVSDQVIPTLMIKVLPPIVAGIFLAAPMSAIMSTIDAQLIQSSSIFVKDLYLSAKPEAAKNEKKVSYFSSIITLILTALLIFAALNPPDMIIWLNLFAFGGLEAAFLWVIVLGIYWDKANAYGALSSMIIGLGSYILLTQLGIKLFNFHQIVPSLVFGLIAFLVGNKLGERRIEKTQLKVTAL

SEQ ID NO: 2061 - DNA, 873 bp, Haemophilus influenzae
atgctctatcaaattcttgcgctacttatttggagcagttcattaatcgtcggtaagctcacttattcgatgatggatcctgtgcttgttgtgcaagtgcggttaattattgcaatgattattgtcatgccactctttttacgtcgttggaaaaaaattgataaaccaatgcgtaaacagctttggtggttggcattctttaactataccgccgtatttttattgcaattcatcgggctaaaatatacatctgcctccagtgcagtcaccatgattgggttagaaccgctactcgttgtatttgtcgggcatttcttctttaaagacaaagcaaaatggtttcactggctattcggtgcaatggcatttattggcgtggcaattttaattaatggcggaaaaaataatgaaggcattgataacatcagtttattcggctgtttattagtactaagtgctgggatcattttcgctgccgtattacgttggacacagcgagttgttgccaaagtttcaacgcaagcctatacctccgtcagcattgtacttggcaccatcacaacattgccatttacgctattactcacagaaaactggcaaatatcattaaattctacgggtattgcaggtttattatatcttgccattggctgtagctggcttgcctattggttatggaataaaggccttaatagtgtagatgccaatatctccggtgttttagtcgcacttgaaccgctattcggcattttatttgctgtatcattacttggcgaaacgctatcattttcagccgcacttggtataacaattattatgttagccacacttggctcgactttactgccgaaacttttaaaaaaatcggtataa

SEQ ID NO: 2062 - protein, 290 aa, Haemophilus influenzae
MLYQILALLIWSSSLIVGKLTYSMMDPVLVVQVRLIIAMIIVMPLFLRRWKKIDKPMRKQLWWLAFFNYTAVFLLQFIGLKYTSASSAVTMIGLEPLLVVFVGHFFFKDKAKWFHWLFGAMAFIGVAILINGGKNNEGIDNISLFGCLLVLSAGIIFAAVLRWTQRVVAKVSTQAYTSVSIVLGTITTLPFTLLLTENWQISLNSTGIAGLLYLAIGCSWLAYWLWNKGLNSVDANISGVLVALEPLFGILFAVSLLGETLSFSAALGITIIMLATLGSTLLPKLLKKSV

SEQ ID NO: 2063 - DNA, 576 bp, Haemophilus influenzae
atgcccccaaaattttggattatcatcattgtgaaaaaaattgatcaacaaagtttagaaaatgcctaccgtttatttgaaagcggtgatattcatcaaattgaaattggttcaacaaaagggctgcaacaaattcatcattacctatttaatggtgtttatgaatttgctggtaaaattcgtgaacaaaatatttcaaaaggtcattttcgctttgctaatgcactttatttaaaagaagcattaggaaaaatagagcaaatgccagaagatacttttgaaaatattattaataaatatgtagaaatgaatattgcgcacccttttttagaaggtaatggtcgttcaactcgcatttggttagatttagttctaaagaaaaatttaggtaaagttgtcaattggcaaaatgtggataaaactcaatacttacaagcaatggagcgtagcccaattaacgatttagaaattcgttttttattacaagcgaatttaacagatgatgtaaataaccgagaaattatttttaaaggtattgagcaatcttattattacgaaggttacgagaaagaataa

SEQ ID NO: 2064 - protein, 191 aa, Haemophilus influenzae
MPPKFWIIIIVKKIDQQSLENAYRLFESGDIHQIEIGSTKGLQQIHHYLFNGVYEFAGKIREQNISKGHFRFANALYLKEALGKIEQMPEDTFENIINKYVEMNIAHPFLEGNGRSTRIWLDLVLKKNLGKVVNWQNVDKTQYLQAMERSPINDLEIRFLLQANLTDDVNNREIIFKGIEQSYYYEGYEKE

SEQ ID NO: 2065 - DNA, 888 bp, Haemophilus influenzae
atggcttggattcaaattcgcctgaacagcaccaatgagaaagcagaacaaatgagcgattttttagaagaaatcggctctgtttctgtgacttttatggatagtcaagatacaccgatttttgagcctttgccaggcgaaacgcgtttatggggtaataccgatgttattgcgctatttgatgcagaaacagatatggcagaaattgttcgcttattaaaagaagcaaaacacttagatagcaatacggcatacaaaattgaacaaatagaagataaagactgggagcgtgagtggatggataacttccacccaatgcaatttggtaagcgtttatggatttgtccaagttggcgtgatgtgcctgatgaaaatgccgtcaatgttatgcttgacccaggtttagcatttggtacaggcactcatcctacaaccgcactatgtttagaatggctagatggtctagatttaaaagataaaagcgtcatcgattttggttgtggatctggtattttagccattgcagcattaaaacttggtgcgaaaagtgcggtgggaattgatatcgatccacaagcaattctagccagtcgcaataatgccgagcaaaatggcgtggcagatcgcctacagctgttcttatctgatgaaaaaccctctgatttaaaagctgatgtcgtggtggcgaatattcttgccggccctctcaaagaactttacccaatcattagccaacttgttaagccgaatggcgatcttggtttatcaggcattttagaaactcaagctcaatcggtatgcgatgcctatacgcaaacatttgcgttagagcccgtcgcggcgagagaagaatggtgccgaattacgggtaagctaaaaacgctttaa

SEQ ID NO: 2066 - protein, 295 aa, Haemophilus influenzae
MAWIQIRLNSTNEKAEQMSDFLEEIGSVSVTFMDSQDTPIFEPLPGETRLWGNTDVIALFDAETDMAEIVRLLKEAKHLDSNTAYKIEQIEDKDWEREWMDNFHPMQFGKRLWICPSWRDVPDENAVNVMLDPGLAFGTGTHPTTALCLEWLDGLDLKDKSVIDFGCGSGILAIAALKLGAKSAVGIDIDPQAILASRNNAEQNGVADRLQLFLSDEKPSDLKADVVVANILAGPLKELYPIISQLVKPNGDLGLSGILETQAQSVCDAYTQTFALEPVAAREEWCRITGKLKTL

SEQ ID NO: 2067 - DNA, 981 bp, Haemophilus influenzae
atgcgaatcggttcataccaattaaaaaatcgtgttttacttgcaccaatggcaggtattaccgaccagcctttccgccgtctttgtgcatattatggtgcggggcttacattttcagaaatgatgtccacaaatccgcaagtttggcataccgaaaaatccaaattgcgtttggcacatagcgaagatttaggtctcaatgcggtgcaaattgcaggtagtgatccactcgagatggcgcaagccgctgctatcaacgtggaatatggcgctcaaatcattgacattaatatgggatgccctgccaaaaaagtaaatcgcaaactcgcaggctctgcattgttgcaatttccagatttggtggaaaaaatcttgcgagaagtcgtgtccgccgtcaatgtgccagtgaccttaaaaattcgtacaggctgggataaatctaatcgaaacagcgttcaaatcggcaaaattgcagaacaatgtggcatacaagcattaacggtgcatggtcgtacacgtgcttgtctttttgaaggcgaagcggagtacgacaacattaaagccgttaaacaagcaattgctataccagttatagctaatggcgatattgattctgctcggaaagcaaaattcgttcttgattatactggagcggatgccattatgatcggtcgtgctgccttaggtaacccttggttatttcaagctgtggaaaacctaattgagcataactcgataagtcaaatgccaagtttaaaagaaaagtgtggtcagattttgcgtcatattcaagaattacatcaattctatggcgaacaaaaaggctatcgcattgcgcgtaaacacgtagcttggtatttacagggaattcaacctgattccgtttttaaacagacttttaatgcaattagtgatcctaaagagcagctgattgtattggaagattttttcaatttaattttggataaagaaaaatgttag

SEQ ID NO: 2068 - protein, 326 aa, Haemophilus influenzae
MRIGSYQLKNRVLLAPMAGITDQPFRRLCAYYGAGLTFSEMMSTNPQVWHTEKSKLRLAHSEDLGLNAVQIAGSDPLEMAQAAAINVEYGAQIIDINMGCPAKKVNRKLAGSALLQFPDLVEKILREVVSAVNVPVTLKIRTGWDKSNRNSVQIGKIAEQCGIQALTVHGRTRACLFEGEAEYDNIKAVKQAIAIPVIANGDIDSARKAKFVLDYTGADAIMIGRAALGNPWLFQAVENLIEHNSISQMPSLKEKCGQILRHIQELHQFYGEQKGYRIARKHVAWYLQGIQPDSVFKQTFNAISDPKEQLIVLEDFFNLILDKEKC

SEQ ID NO: 2069 - DNA, 300 bp, Haemophilus influenzae
atgttagaacaacaacgtaattctgccgatgccttaacggtatcagtattaaatgcgcaatcacaagtgaccagcaaaccattacgcgattcagtcaaacaagcgttgcgtaattatttagcacaattagatggtcaagatgtgaatgatctttacgagctagtattagcggaagttgaacaccctatgttagatatgattatgcaatatactcgtggtaatcaaacccgtgcagcaaatatgcttggtatcaaccgtggtacattacgtaaaaaattaaaaaaatacggtatgggataa

SEQ ID NO: 2070 - protein, 99 aa, Haemophilus influenzae
MLEQQRNSADALTVSVLNAQSQVTSKPLRDSVKQALRNYLAQLDGQDVNDLYELVLAEVEHPMLDMIMQYTRGNQTRAANMLGINRGTLRKKLKKYGMG

SEQ ID NO: 2071 - DNA, 486 bp, Haemophilus influenzae
atgacaaagaaaaaagtaaaacccaattcaaatactatcgcactaaataaacgtgcaagacacgattattttattgaagatgaaattgaatcaggtcttgaattacaaggctgggaagtcaaatctatgcgcgcaggcaaggcaaatattagtgatagttatgttatttttaaaaatggcgaagcctttttattcggcgcaagcattcagccattaaatgttgcatcaacgcatattgtttgtgatccaactcgcactcgtaagttattgttaaataaacgcgaattagcatccctatttggcaaagcaaaccgagacggttttaccatagttgcactttctctttactggaaaagtgcgtgggcaaaagtcaaaattggtttagccaaaggtaaaaaacaacaggataaacgtgatgatattaaagaacgtgaatggaaagtaacaaaagatcgcattatgaaaaatgcacatcgaagatcttaa

SEQ ID NO: 2072 - protein, 161 aa, Haemophilus influenzae
MTKKKVKPNSNTIALNKRARHDYFIEDEIESGLELQGWEVKSMRAGKANISDSYVIFKNGEAFLFGASIQPLNVASTHIVCDPTRTRKLLLNKRELASLFGKANRDGFTIVALSLYWKSAWAKVKIGLAKGKKQQDKRDDIKEREWKVTKDRIMKNAHRRS

SEQ ID NO: 2073 - DNA, 966 bp, Haemophilus influenzae
atgattaaaaaaattgcagttttaacaagtggtggcgatgcgcctggtatgaatgccgcaattcgtggcgtagtacgttctgcacttgcagaaggcttagaagtatttggtatctatgacggttatcaaggtttatacaataataaaatcaaacaattaaatcgctatagcgtatctgatgtgattaatcgtggcggtacttttttaggttctgcacgttttcctgaatttaaagatcctaatattcgggcaaaatgtgcggaaattttacgttctcacggcattgatgcacttgtggttatcggtggtgacggttcttatatgggggcaaaattattaaccgaagaacacagtttcccttgtgttggcttacccggtactattgataatgatgttgcaggtactgactataccatcggttatcaaaccgcattacaaactgcagtggatgcaatcgaccgtttacgtgatacatcaagctcacaccaacgtatttctatcgttgaaattatgggtcgccattgtagtgacttaaccatttctgcgggcattgctggcggttgtgaatatatcgtcgcatcagaaattgaatttaatcgcgaagaattaattcaacaaattgaacgtagcattattcgcggtaaacgccacgctattattgcaatcactgaacttttaaccgatgttcattctctggcaaaagaaattgaagctcgcgtaggtcacgaaactcgcgcaaccgttttagggcatattcaacgtggtggttctccttgtgcttttgaccgtattcttgcctcacgtatgggcgcatacgcagtagatttattgctacaaggcaaaggcggctattgcgtaggtatccaaaatgaacaactcgttcatcacgatattattgatgccattaataatatgcagcgtatatttaaggctgattggcttaaagtggcaaaacgtttggaataa

SEQ ID NO: 2074 - protein, 321 aa, Haemophilus influenzae
MIKKIAVLTSGGDAPGMNAAIRGVVRSALAEGLEVFGIYDGYQGLYNNKIKQLNRYSVSDVINRGGTFLGSARFPEFKDPNIRAKCAEILRSHGIDALVVIGGDGSYMGAKLLTEEHSFPCVGLPGTIDNDVAGTDYTIGYQTALQTAVDAIDRLRDTSSSHQRISIVEIMGRHCSDLTISAGIAGGCEYIVASEIEFNREELIQQIERSIIRGKRHAIIAITELLTDVHSLAKEIEARVGHETRATVLGHIQRGGSPCAFDRILASRMGAYAVDLLLQGKGGYCVGIQNEQLVHHDIIDAINNMQRIFKADWLKVAKRLE

SEQ ID NO: 2075 - DNA, 582 bp, Haemophilus influenzae
atgaataaaatttttgttattttgaccgcacttatactttcaggctgtgcaactaagctgacacaattaaatgtgcctacccagttagaatataatggaaaacattatgtacttactggcagccaagatttcgaaaccattgcacgctatgtgtatattgctaaaccagatacgctggaaaattggcaatctgaaattgaaattctctttgatcgcaatcaatccgaacgttctattaaagaacgtattgcattaagagaacgcatttatcgcaatacaggcgtaaaagatttccatttcgatgctattccaaaaaattcgaccaatccaaatgaattaaatggatatgttatctattcgccaacgaaagaaaatccatcttggcaagtcaatgtgatgaaaggacgacaattgtcccaatgtggctttgtgcaatttcaatattcgcagaaaatacagcaaccaacgcgttctaaacatttatctgtcaataaagtacaacgacatttgcaaaaatacattgtggatatagaaagaaagcatttacaaaatttgaaatggcaactgttttgtgaaaaataa

SEQ ID NO: 2076 - protein, 193 aa, Haemophilus influenzae
MNKIFVILTALILSGCATKLTQLNVPTQLEYNGKHYVLTGSQDFETIARYVYIAKPDTLENWQSEIEILFDRNQSERSIKERIALRERIYRNTGVKDFHFDAIPKNSTNPNELNGYVIYSPTKENPSWQVNVMKGRQLSQCGFVQFQYSQKIQQPTRSKHLSVNKVQRHLQKYIVDIERKHLQNLKWQLFCEK

SEQ ID NO: 2077 - DNA, 852 bp, Haemophilus influenzae
atggcttatataaacgcgtttagtgtaaatttttatgctaagatacgcccattcttttttcataaaaggacgattatgttagcgattatctcccctgcgaaaactcttgattttgaaagtgcggtaaaaaattttcctgtttctcaaccgcactttaccgattacagcgaacaacttattgaggtttgtcgtaaactttctccgcaagatctttcatcgcttatgtctatcagcgataagttggctggtttaaatgctgcacgctttgcagaatggacaaaaattcacaatgaaaacaattcccgccctgcactctttgcatttaaaggcgatgtttatactggtttagatgctgcttccctttcggaagatgatgtcatttttgcgcaatcccatttacgtatgctgtctggcctttatgggcttttaaaaccacttgatttaatgcaaccttaccgattagaaatggggacaaaattagccaatccgaaaggaaaagatctgtatgccttttggggaaatgtgatcacccaagcggttcaacaagctatagatgaacaaggcgataatgttctgataaatttagcctctgatgaatattataaatctgttaaagaaagccaaattaacgctaaaattattaagccagttttcttagataataaaaatggcaaatacaaagtaattagtttttatgctaaaaaagcgcgaggcttaatgtgtcgctatattattcaacatcatttaactgaaattgaacagttaaaagaatttgatttaggtggttattggtttgattcagcatcctccactgaaactgaatttgtctttaagcgagatattaatgaataa

SEQ ID NO: 2078 - protein, 283 aa, Haemophilus influenzae
MAYINAFSVNFYAKIRPFFFHKRTIMLAIISPAKTLDFESAVKNFPVSQPHFTDYSEQLIEVCRKLSPQDLSSLMSISDKLAGLNAARFAEWTKIHNENNSRPALFAFKGDVYTGLDAASLSEDDVIFAQSHLRMLSGLYGLLKPLDLMQPYRLEMGTKLANPKGKDLYAFWGNVITQAVQQAIDEQGDNVLINLASDEYYKSVKESQINAKIIKPVFLDNKNGKYKVISFYAKKARGLMCRYIIQHHLTEIEQLKEFDLGGYWFDSASSTETEFVFKRDINE

SEQ ID NO: 2079 - DNA, 1122 bp, Haemophilus influenzae
atgaatgacattacctacacattactccgtttaatgcaagtgcctaaacttggcggcgttggcattgataaaattttgtccaatattaccttaaatgaattacttaattatgatgatgttgctttccgacaaatggggtggggagccattcaaattcgccgttggttcaagcctgaagcaaaatttattgagcctgcacttgtgtggtcacaaaaagagggaaatcatttagtgaattatttttcccctttttatccctttttgttgaaacagaccgcaagttttccgccactattatttgtaaaaggaaatttaaccgcactttcacaacgccaaatggcaatggttggaagccgttattgcacgacttacggagaatattgggcaaaacattttgcgacagaactttcattagctggatttacgattactagtggacttgcattaggaattgatggacattgccatcaagctgtcgtcaatattcaaggacaaactattgcggttttaggcagtggattagaacaaatctatccctctaaacatcaaagattatcggcacaaatcatcgaaaataatggcgcattagtctctgaattcttaccaaaccaagcccccattgccgctaatttcccacgtcgtaatcggattattagcgggctttcagtcggcacgcttgttgttgaagccacagaaaaaagcgggtcgcttattactgcgcgatatgcgttggaacaaaaccgagaggtttttgctgtgccgggaaacattcaaaatgaatcaagtcaaggttgtcatcgcctaattaaacaaggtgcaatgttagtagaaaatgctaaagatattttggaaaccctctaccaacattctatccatagccaaactgaaattgattttgaccagatcgccgtgcctaattacacgcctccacctgatcctcgtcgattagtagaagcaccaagccacccgaaactttattcgcgtattggttacacgcctgtgagcattgatgatttagctgaagaatttaatttaagcgtcgatgttttgcttgttcagttgctcgatcttgagttgcaagatcttatcataagtgaaaatggcttatataaacgcgtttag

SEQ ID NO: 2080 - protein, 373 aa, Haemophilus influenzae
MNDITYTLLRLMQVPKLGGVGIDKILSNITLNELLNYDDVAFRQMGWGAIQIRRWFKPEAKFIEPALVWSQKEGNHLVNYFSPFYPFLLKQTASFPPLLFVKGNLTALSQRQMAMVGSRYCTTYGEYWAKHFATELSLAGFTITSGLALGIDGHCHQAVVNIQGQTIAVLGSGLEQIYPSKHQRLSAQIIENNGALVSEFLPNQAPIAANFPRRNRIISGLSVGTLVVEATEKSGSLITARYALEQNREVFAVPGNIQNESSQGCHRLIKQGAMLVENAKDILETLYQHSIHSQTEIDFDQIAVPNYTPPPDPRRLVEAPSHPKLYSRIGYTPVSIDDLAEEFNLSVDVLLVQLLDLELQDLIISENGLYKRV

SEQ ID NO: 2081 - DNA, 1548 bp, Haemophilus influenzae
atgacagatcgcgttattatttttgataccaccttgcgtgatggggagcaggcattaaaagcaagtttgacggtaaaagaaaaattacagatcgctttagcacttgaacgcttaggtgtggatgtaatggaagtagggtttcctgtttcttctcaaggggattttgaatctgttcaaaccattgcgtgccatattaaaaacgtgcgtgttgctgcgttatctcgagcggtagagaaagacattgatgccgcatatgaagccttaaaagtggcagaagcattccgtattcatacgtttattgcaagttccgcattgcacgttgaagcgaaattaaaacgttcttttgatgatgtggtaggaatggcagttgcagcagtgaaacgcgcacgtaattatacggatgatgttgagttttcttgcgaagatgcaggccgtacaggcattgataatatctgtcgtattgttgaagcggcaatcaatgcaggtgcaactacggtaaatattcccgatacagtcggtttttgcttaccaaatgaatacggcaatattattgctcaagtgcgtaattgcgtaccgaatattgataaagcagtgatttccgtgcattgccacaatgacttaggtatggcaaccgctaattctttaacggcagtacaaaatggtgcgcgccaaattgaatgtaccattaatggaattggcgaacgtgcgggcaatacctctcttgaagaagtggttatggcaatgaaagtgcgtcaggattttatgggtgtggatacccgtattaatacccaagaaattcaccgtgtcagccaaatggtaagccaactttgcaatatgccgattcagccgaataaagccattgtgggttcaaatgcttttgcccattcttctggcatccatcaagatggtatgttgaaaaacaaaaatacttacgaaattatgtctccagaaaccattggattgaaaaaagaaaaattaaatttaaccgcacgttctggtcgtgcagctgtgaaaggtcatatggcagatatgggttacaccgaacaagattatgatttggataaattgtatgactctttcttaaaattggcggataaaaaaggtcaagtgtttgattatgatttggaagcattggcgtttatcgatatgcaacaaggggatgaggatcgtttggtattagataaactttcggcacactccaccaaagaatatccagcaactgcgtttgttcaattgaagttggatggcgaaaaattaagtacgtcttcaattggcggtaatggcccagtggatgcggtttataacgccatcttaaatttaacgggtttagaaatcaaaatgtctcactataacttaactgctaaaggcgagggcgcagaagcattagggcaagtggatattgtggtggaacacaaagggcgtaaattccacggcgtcggtttagcaacagacattgttgaatcttccgcacttgctttagtccacgccatcaatgccatttatcgagcgcataaagtggcagatattaagaatcataaacatcattaa

SEQ ID NO: 2082 - protein, 515 aa, Haemophilus influenzae
MTDRVIIFDTTLRDGEQALKASLTVKEKLQIALALERLGVDVMEVGFPVSSQGDFESVQTIACHIKNVRVAALSRAVEKDIDAAYEALKVAEAFRIHTFIASSALHVEAKLKRSFDDVVGMAVAAVKRARNYTDDVEFSCEDAGRTGIDNICRIVEAAINAGATTVNIPDTVGFCLPNEYGNIIAQVRNCVPNIDKAVISVHCHNDLGMATANSLTAVQNGARQIECTINGIGERAGNTSLEEVVMAMKVRQDFMGVDTRINTQEIHRVSQMVSQLCNMPIQPNKAIVGSNAFAHSSGIHQDGMLKNKNTYEIMSPETIGLKKEKLNLTARSGRAAVKGHMADMGYTEQDYDLDKLYDSFLKLADKKGQVFDYDLEALAFIDMQQGDEDRLVLDKLSAHSTKEYPATAFVQLKLDGEKLSTSSIGGNGPVDAVYNAILNLTGLEIKMSHYNLTAKGEGAEALGQVDIVVEHKGRKFHGVGLATDIVESSALALVHAINAIYRAHKVADIKNHKHH

SEQ ID NO: 2083 - DNA, 1077 bp, Haemophilus influenzae
atgcaatcatacaatatagcagtattagcaggcgatggtatcggccccgaagtcatggcggaagccattaaggtattaaacagagttcaagaaaaatttggttttaaacttaactttaacgagttttttgtcggcggtgcggctattgatcattgcggttatccgttaccagcagaaaccttaaaaggatgtgatcaagcggatgccattttatttggttctgtaggtggtcctaaatggacaaatttaccaccagatcaacagccagaacgtggtgcattattgcctttgcgtaaacatttcaaattattctgtaatcttcgtcctgcaaccctttataaaggcttggaaaaattctgtccattacgtgcagatattgccgcaaaaggttttgatatggtggtggtgcgtgaattaacgggcggaatttatttcggtcagcctaaaggtcgtgagggggatggcgtacaaaccaaagcatttgatacggaagtgtattacaaatatgaaatcgaacgcattgcacgtgcggcttttgaggcagcaatgaaacgcaataaaaaagtcacttctgtagataaagcgaacgtattacagtcttccattttatggcgtgaaactgtgacagaaatagcaaaagactatcctgaagtgactttagagcatatctatattgataacgccacaatgcaattaatcaaagcaccagaatcttttgatgttttgctttgctctaatattttcggcgatattatttctgacgaagcagcgatgatcacaggttctatgggaatgttgccctctgccagcttaaatgaagagggttttggtttatacgagcctgctggtggttccgcccctgatattgcaggcaaaggcattgccaacccaatcgcacaaattctttctgctgcgatgatgttgcgttacagcttcaacttaaacgaagcagcagatgccattgaaaatgcggtacaaaaagtcttggcaagtggacatcgcaccgccgatttagctgatgattccacaccagtttctactgcagaaatgggtacattgattgcacaagcaatttaa

SEQ ID NO: 2084 - protein, 358 aa, Haemophilus influenzae
MQSYNIAVLAGDGIGPEVMAEAIKVLNRVQEKFGFKLNFNEFFVGGAAIDHCGYPLPAETLKGCDQADAILFGSVGGPKWTNLPPDQQPERGALLPLRKHFKLFCNLRPATLYKGLEKFCPLRADIAAKGFDMVVVRELTGGIYFGQPKGREGDGVQTKAFDTEVYYKYEIERIARAAFEAAMKRNKKVTSVDKANVLQSSILWRETVTEIAKDYPEVTLEHIYIDNATMQLIKAPESFDVLLCSNIFGDIISDEAAMITGSMGMLPSASLNEEGFGLYEPAGGSAPDIAGKGIANPIAQILSAAMMLRYSFNLNEAADAIENAVQKVLASGHRTADLADDSTPVSTAEMGTLIAQAI

SEQ ID NO: 2085 - DNA, 1410 bp, Haemophilus influenzae
atggcaaaaacactttacgaaaaattatttgattcacacattgtgtatgaagcagagggcgaaacgccgattttgtatatcaaccgtcatttgattcacgaagtaaccagcccgcaggcctttgatgggttacgcgtcgcaaatcgccaagtacgtcaagtaaacaaaactttcggcacaatggatcacagcatttctactcaagtacgagatgtcaataaacttgaaggtcaagcgaaaattcaagtgttagaattggataaaaataccaaagcaacaggtattaaattatttgatataacaactaaagagcaaggtattgtacacgttatggggcctgaacaaggtttaaccttacctggtatgacaattgtttgtggcgattcacacaccgcaacccacggtgcatttggtgccttggcttttggtattggtacttctgaagtagaacacgtattagccactcaaactttaaaacaggctcgcgcaaaaagtatgaaaattgaagtgcgtggtaaagtcgcatcaggtattacggcaaaagatattattcttgccattatcggcaaaactacgatggcaggcggtacaggacacgttgtagaattctgtggcgaagcgatccaagacctttctatggaggggcgtatgaccgtctgtaatatggcaattgaaatgggtgcaaaagcaggcttgattgcgccagatgaaaccacatttgcatatttgaaagatcgtccacacgcgccgaaaggcaaagattgggaggatgccgttgcttattggaaaaccttaaaatctgacgatgatgcacaatttgacactgtggtaacgctagaagcaaaagacatcgcaccacaagtcacttgggggacaaaccctgggcaagtcatttctgtgaatgaaaccataccaaatccgcaagaaatggcagaccctgtacaacgtgcttcggcggaaaaagccttacattatattggcttggaagctggcactaatttaaaagatattaaagttgatcaagtgttcatcggatcttgcaccaactcgcgcattgaagatttacgcgcagcagcggcagtgatgaaaggccgtaaaaaagcggataacgtaaaacgtattttagttgtcccaggttctggcttagtgaaagaacaagcggaaaaagagggcttggataaaatctttattgccgcaggtgcagaatggcgtaatccaggttgttcaatgtgtttagggatgaacgacgaccgtttaggcgaatgggaacgctgtgcttccacttcaaaccgtaactttgaagggcgtcaaggtcgtaatggacgtacccatttggtaagccctgcaatggcagcggcagcaggaatgttcggtaaatttgttgatattcgtgatgtaacattaaactaa

SEQ ID NO: 2086 - protein, 469 aa, Haemophilus influenzae
MAKTLYEKLFDSHIVYEAEGETPILYINRHLIHEVTSPQAFDGLRVANRQVRQVNKTFGTMDHSISTQVRDVNKLEGQAKIQVLELDKNTKATGIKLFDITTKEQGIVHVMGPEQGLTLPGMTIVCGDSHTATHGAFGALAFGIGTSEVEHVLATQTLKQARAKSMKIEVRGKVASGITAKDIILAIIGKTTMAGGTGHVVEFCGEAIQDLSMEGRMTVCNMAIEMGAKAGLIAPDETTFAYLKDRPHAPKGKDWEDAVAYWKTLKSDDDAQFDTVVTLEAKDIAPQVTWGTNPGQVISVNETIPNPQEMADPVQRASAEKALHYIGLEAGTNLKDIKVDQVFIGSCTNSRIEDLRAAAAVMKGRKKADNVKRILVVPGSGLVKEQAEKEGLDKIFIAAGAEWRNPGCSMCLGMNDDRLGEWERCASTSNRNFEGRQGRNGRTHLVSPAMAAAAGMFGKFVDIRDVTLN

SEQ ID NO: 2087 - DNA, 603 bp, Haemophilus influenzae
atggcaggatttaaacaactttcaggcttagtcgtaccattggatgcggcaaatgtagataccgatgcaattattccaaaacaatttttacaagccattacccgagtaggtttcggcaaacacttattccacgaatggcgttatcttgatgtggacggcaccaagccaaatccagaatttgtcttaaattatccgcaatatcaaggtgcaacaattttgttggcgcgtaaaaaccttggctgtggttcttctcgtgaacacgccccttgggcattagccgattacggttttaaagtaatgatcgccccaagttttgcagatattttctataacaatagcttaaataatcatatgttaccgattcgtttaagcgaagaagaagtagaagaaatcttccaatgggtatgggcaaatgaaagcaagcaaatccacatagatttagaagcgatgacggtcactgtaggggataaagtttatacttttgagcttgatgaatttcgccgccattgtttgctaaacggtttagataatatcggtttaacccttcagcacgaagacaaaatctcagcatatgagaaaaatattccagcgtttttacgttaa

SEQ ID NO: 2088 - protein, 200 aa, Haemophilus influenzae
MAGFKQLSGLVVPLDAANVDTDAIIPKQFLQAITRVGFGKHLFHEWRYLDVDGTKPNPEFVLNYPQYQGATILLARKNLGCGSSREHAPWALADYGFKVMIAPSFADIFYNNSLNNHMLPIRLSEEEVEEIFQWVWANESKQIHIDLEAMTVTVGDKVYTFELDEFRRHCLLNGLDNIGLTLQHEDKISAYEKNIPAFLR

SEQ ID NO: 2089 - DNA, 4638 bp, Haemophilus influenzae
atgctaaataaaaaattcaaactcaattttattgcacttactgtcgcctacgcattaaccccttatacagaagccgcgttagtgagagacgatgtggattatcaaatatttcgtgattttgcagagaataaagggaagttttctgttggtgcaacaaatgtggaagtgagagataaaaataaccgacctttaggcaatgttttacctaatggtattccgatgattgattttagtgttgtggatgtagataagagaattgccacgttggtaaatccacaatatgtagtaggcgtaaaacacgttagtaacggcgtgagtgaactacattttgggaacttaaatggcaatatgaataatggcaatgctaaagcacaccgagatgtatcctctgaagaaaaccgatattacaccgttgaaaaaaacgagtatccaactaaattaaatggaaaagcagtaactactgaagatcaagctcaaaaacgccgtgaagattattatatgccacgtcttgataaatttgttaccgaagttgcaccaatagaggcttcaactgatagtagtacagcggggacatataataataaagataaatatccttactttgtaagacttggtagtggtactcaatttatttatgaaaatggaacacgctatgaattatggttaggtaaagaagggcagaaaagcgatgcgggcggctataatcttaaattagttggtaatgcttatacctatggtattgcaggtacgccttatgaagtaaatcacgagaacgatgggcttatcggcttcggcaactcaaataatgaatacattaatccaaaagaaatattatccaaaaaaccacttactaattacgctgttttaggggacagcggatccccattatttgtatatgatagagaaaaaggaaaatggcttttccttggttcttatgattactgggctggttataacaaaaaatcttggcaggaatggaatatctataaacctgaatttgcagaaaaaatttatgaacaatatagtgcaggttctttaattggttccaagacagattatagttggtcttctaatggcaagacaagtacgattacgggaggggagaaatctttaaatgttgatttagctgacggaaaagataaacctaatcacgggaaaagtgttacatttgaagggagtggaacgcttaccttaaataataatatcgatcaaggtgcaggcggattattctttgaaggcgattatgaagttaaaggtacttctgataatactacttggaaaggagcaggtgtctctgttgccgaaggaaaaactgtaacgtggaaagtgcataatcctcaatatgatcgtttagcaaaaattggcaaagggacattaattgttgaaggaacaggagataataaaggttcgctaaaagtgggcgatggcaccgttattttaaaacaacaaacaaatggttcgggacaacacgcttttgcttctgtagggattgtaagtggtcgctcaactcttgtgcttaatgatgataaacaagtagatccaaattcaatttactttggatttagaggcggtcgattagatttaaacggtaattcactaacctttgaccacatcagaaatattgatgaaggtgcgagactggttaatcacagtaccagtaaacactctacagtgacaattactggggataatttgattacagatccaaataatgtctctatatattatgtaaaaccactagaggacgataatccttatgccattcggcaaataaaatatggataccaactctattttaatgaagaaaacagaacttattatgcattaaaaaaagatgctagtattcgctcagaatttcctcaaaacagaggagaaagcaataatagttggctatatatgggaacagagaaagctgacgctcaaaaaaatgcaatgaaccatatcaacaacgagcgtatgaatggctttaacggttattttggtgaggaagaaggtaaaaataacggtaatctaaatgtgacttttaaaggcaaaagtgagcaaaatcgctttttattaacaggcggaacaaaccttaatggcgatttaaatgttcaacaaggtacattattcctttctggcagacctacaccacacgcaagagatattgcgggtatttcttcaacgaagaaagattcacacttttctgaaaataatgaagtggtggtagaagacgactggattaaccgcaattttaaagcaacaaatattaatgtaaccaataacgcaaccctttattcaggtcgcaatgttgaaagtattacttcaaatatcacagcttctaataatgcaaaagtgcatatcggctataaagcaggcgataccgtttgtgtacgttctgactatacgggctatgtgacttgtactactgacaagttatccgataaagcccttaatagctttaatccaaccaatctacgcggcaatgtaaatttaaccgaaagtgcaaactttgtcttaggcaaagccaacttattcggcacaattcaaagcagaggaaatagccaagtacgtttaaccgaaaatagccattggcatttaacaggaaatagtgatgttcatcaattagatctagcaaatgggcatattcatttaaattcagcagacaattcaaacaatgtgacaaaatataacacgctgactgtgaatagcttatcaggtaacggttctttctattatttaactgatctttccaataaacaaggcgacaaagttgttgtaactaaatccgccacaggtaactttacattacaagtggcagataaaacaggcgagccaaatcataatgaactcacactttttgatgcttcaaaagctcaaagagatcatttgaatgtgtcattagttgggaataccgttgatttaggtgcttggaaatataaattacgtaatgttaatggacgttacgatttgtataacccagaggtggaaaaaagaaatcaaactgtcgatacgacaaatatcacaacacctaataatattcaagctgatgtgcctagcgtaccaagtaacaatgaagaaatagcccgtgttgatgaagcaccagttccaccacctgcgcctgctacaccatcagagacaactgaaacagtggctgaaaatagtaagcaagaaagtaaaacagtagagaaaaacgagcaagacgcaaccgagacaacagctcaaaatagagaagttgcaaaagaagctaaatcaaatgtaaaagctaatactcaaacaaatgaagtagctcaaagtggaagtgaaaccaaggaaactcaaacgactgaaacaaaagaaacagctacggtagaaaaagaagaaaaggctaaagtagaaacagagaaaactcaagaagtccctaaagtgacttctcaagtgtctccgaaacaggaacagtctgaaactgttcaaccgcaagcagagcctgctcgtgaaaatgatccgactgttaatataaaagagcctcaatctcaaacaaatacaacagcagacactgaacaacctgcgaaagagactagctcaaatgttgaacaaccagtgacagaaagcacaacagtaaacactggaaactctgtagtggaaaatccagagaatacaacacctgctacaactcaacctacggttaattcagaaagcagtaataagccaaagaatagacatagaagaagtgttcgctcagttccgcataatgttgaaccagctacaacaagtagcaacgatcgttctacagtagcattgtgcgatctcacaagtacaaacacaaatgcggtactttctgatgcaagggcaaaagcacaatttgttgcattaaatgtggggaaagcagtttctcaacatattagccagttagaaatgaataacgaggggcaatataacgtttgggtatctaatacttcaatgaacaaaaattattcctcaagtcaatatcgtcgttttagttctaaaagtacgcaaactcaactgggttgggatcaaacaatctcaaacaatgttcagttaggtggcgtgtttacttatgttcgcaatagtaacaactttgataaggcaacaagtaaaaatactctagcacaagttaatttctattctaaatattatgcggataatcattggtatttgggcattgatttaggctacggcaagttccaaagcaaattacaaactaatcataatgcgaaatttgctcgccatactgcacaatttggtttaaccgcaggcaaagcatttaatcttggcaattttggtattacgccaatagtaggcgtgcgttatagctatttatcaaacgctgattttgcattagatcaagctcgcattaaagtaaatccaatatctgtcaaaacagcctttgctcaagttgatttaagttatacttatcacttaggcgagttttccgttacgccaattttgtctgctcgatatgatgcaaaccaaggcagcggaaaaattaatgtaaatggatatgattttgcttacaacgtggaaaaccaacagcaatataacgcagggcttaaattgaaatatcataatgtgaaattaagtctaataggcggattaacaaaagcgaaacaagcggaaaaacaaaaaactgcagaattaaaactaagttttagtttttaa

SEQ ID NO: 2090 - protein, 1545 aa, Haemophilus influenzae
MLNKKFKLNFIALTVAYALTPYTEAALVRDDVDYQIFRDFAENKGKFSVGATNVEVRDKNNRPLGNVLPNGIPMIDFSVVDVDKRIATLVNPQYVVGVKHVSNGVSELHFGNLNGNMNNGNAKAHRDVSSEENRYYTVEKNEYPTKLNGKAVTTEDQAQKRREDYYMPRLDKFVTEVAPIEASTDSSTAGTYNNKDKYPYFVRLGSGTQFIYENGTRYELWLGKEGQKSDAGGYNLKLVGNAYTYGIAGTPYEVNHENDGLIGFGNSNNEYINPKEILSKKPLTNYAVLGDSGSPLFVYDREKGKWLFLGSYDYWAGYNKKSWQEWNIYKPEFAEKIYEQYSAGSLIGSKTDYSWSSNGKTSTITGGEKSLNVDLADGKDKPNHGKSVTFEGSGTLTLNNNIDQGAGGLFFEGDYEVKGTSDNTTWKGAGVSVAEGKTVTWKVHNPQYDRLAKIGKGTLIVEGTGDNKGSLKVGDGTVILKQQTNGSGQHAFASVGIVSGRSTLVLNDDKQVDPNSIYFGFRGGRLDLNGNSLTFDHIRNIDEGARLVNHSTSKHSTVTITGDNLITDPNNVSIYYVKPLEDDNPYAIRQIKYGYQLYFNEENRTYYALKKDASIRSEFPQNRGESNNSWLYMGTEKADAQKNAMNHINNERMNGFNGYFGEEEGKNNGNLNVTFKGKSEQNRFLLTGGTNLNGDLNVQQGTLFLSGRPTPHARDIAGISSTKKDSHFSENNEVVVEDDWINRNFKATNINVTNNATLYSGRNVESITSNITASNNAKVHIGYKAGDTVCVRSDYTGYVTCTTDKLSDKALNSFNPTNLRGNVNLTESANFVLGKANLFGTIQSRGNSQVRLTENSHWHLTGNSDVHQLDLANGHIHLNSADNSNNVTKYNTLTVNSLSGNGSFYYLTDLSNKQGDKVVVTKSATGNFTLQVADKTGEPNHNELTLFDASKAQRDHLNVSLVGNTVDLGAWKYKLRNVNGRYDLYNPEVEKRNQTVDTTNITTPNNIQADVPSVPSNNEEIARVDEAPVPPPAPATPSETTETVAENSKQESKTVEKNEQDATETTAQNREVAKEAKSNVKANTQTNEVAQSGSETKETQTTETKETATVEKEEKAKVETEKTQEVPKVTSQVSPKQEQSETVQPQAEPARENDPTVNIKEPQSQTNTTADTEQPAKETSSNVEQPVTESTTVNTGNSVVENPENTTPATTQPTVNSESSNKPKNRHRRSVRSVPHNVEPATTSSNDRSTVALCDLTSTNTNAVLSDARAKAQFVALNVGKAVSQHISQLEMNNEGQYNVWVSNTSMNKNYSSSQYRRFSSKSTQTQLGWDQTISNNVQLGGVFTYVRNSNNFDKATSKNTLAQVNFYSKYYADNHWYLGIDLGYGKFQSKLQTNHNAKFARHTAQFGLTAGKAFNLGNFGITPIVGVRYSYLSNADFALDQARIKVNPISVKTAFAQVDLSYTYHLGEFSVTPILSARYDANQGSGKINVNGYDFAYNVENQQQYNAGLKLKYHNVKLSLIGGLTKAKQAEKQKTAELKLSFSF

SEQ ID NO: 2091 - DNA, 1080 bp, Haemophilus influenzae
atggcgatttctcgtttactggtcgaaaaatttcgtaatttaacagcagtggatcttgattttgatccctgctttaactttctaatcggcaacaacggcagcggaaaaaccagcttattagaagccattttttatcttggtcacggacgttcatttaaaagtgcggtcacaaatcgcatcatttcttacgacgaaccgcactttaccctatttggaaaaatccaagaaagccaacatcaatggtctatcggcttacaaaaacttcgtcaaggcaacaccttagtaaaaattaacggtgaagatggcaataaaatttccgatctcgcccatcttttaccaatgcaattaatcaccccagagggcttaaccttactcaacggcgggccaagttatcgccgcgcgtttttagattggggattattccatcaccaaacaagtttctattccgcttggagcaatctcaatcgattactcaaacaacgaaatgccgcccttgcacaaaatcagccttactctgccataaaaatttgggacgttgaacttgccaaacttgcccatcaagtaagtcaatggcgtgccgaatacgcagaagcactacgccctgaaattgagcaaacttgccgactttttctgcctgaattagaaattaatgtcagctttcatcaaggatgggaaaaaaatgctgattattatgaaattcttcaacaaaattttgaacgagatcgtgccttaaattacaccttttctggccctcaaaaagcggattttcgtttcaaagcacaaggattgccagtggaagatgtgctttctcgtgggcagcttaaacttttaatgtgcgcattaagactagcgcagggcgagcatttaatgaaagaaaagcaacgccattgtatttttttaattgatgattttgcctcggaattagatcaatacaaacgtgccttgttggcagaacgattacaacaaagcggttcgcaagtatttgttaccgccatcactcaaagacaactaaaagaaatgcaagtggaaaacaaaaaaatgttttctgtccataatggcatcattaacgccttaaattag

SEQ ID NO: 2092 - protein, 359 aa, Haemophilus influenzae
MAISRLLVEKFRNLTAVDLDFDPCFNFLIGNNGSGKTSLLEAIFYLGHGRSFKSAVTNRIISYDEPHFTLFGKIQESQHQWSIGLQKLRQGNTLVKINGEDGNKISDLAHLLPMQLITPEGLTLLNGGPSYRRAFLDWGLFHHQTSFYSAWSNLNRLLKQRNAALAQNQPYSAIKIWDVELAKLAHQVSQWRAEYAEALRPEIEQTCRLFLPELEINVSFHQGWEKNADYYEILQQNFERDRALNYTFSGPQKADFRFKAQGLPVEDVLSRGQLKLLMCALRLAQGEHLMKEKQRHCIFLIDDFASELDQYKRALLAERLQQSGSQVFVTAITQRQLKEMQVENKKMFSVHNGIINALN

SEQ ID NO: 2093 - DNA, 1101 bp, Haemophilus influenzae
atgcaatttagcatttcaagagaaaatttattaaaaccgttgcaacaagtatgtggcgtattgagtaatcgtccaaacattcctgtattaaacaacgtgttgttgcaaattgaagacaatcgtctgactatcacagggacagatttagaagttgaactctctagtcaaactcagctttcatcatcttctgaaaatggcacttttaccattccagcaaaaaaattcttagatatttgccgcactttatctgatgattcagaaattacggtgacttttgaacaagatcgtgcattagtgcaatctgggcgtagccgttttacactagcaacccaacctgccgaagaatatcccaacctcacagattggcagtctgaagtggattttgaactaccgcaaaataccttacgccgtttaattgaagccactcaattttctatggcaaaccaagatgcacgctatttcttaaatggtatgaagtttgaaacagagggcaatttattgcgaactgtggcaacagatggtcatagacttgcggtctgtactatttcacttgaacaagaattacaaaatcattctgtgattttacctcgtaaaggcgtgttagagctggttcgtttattagaaacaaacgatgaaccagcacgcttacaaattggcacgaacaatttacgtgtccatttaaaaaacacagtatttacatcaaaattaattgatggtcgctttcctgactatcgccgagtattgcctagtaatgccacaaaaattgtcgaaggcaattgggaaatgctgaaacaggcttttgttcgtgcgtctattttatctaatgaacgcgcacgcagcgtacgtttaagtttcaaggaaaaccagcttaaaattactgcctcaaatacagaacacgaagaagcagaagaaattgtcgatgtcaattacaatggcgaagaattagaagtgggctttaatgtgacctatattcttgatgtgctgaatgcacttaaatgtaatcaagtgcgaatgtgcttaactgatgcgttctccagttgcttaattgaaaactgtgaagacagcagctgcgaatacgtcattatgccaatgcgtttataa

SEQ ID NO: 2094 - protein, 366 aa, Haemophilus influenzae
MQFSISRENLLKPLQQVCGVLSNRPNIPVLNNVLLQIEDNRLTITGTDLEVELSSQTQLSSSSENGTFTIPAKKFLDICRTLSDDSEITVTFEQDRALVQSGRSRFTLATQPAEEYPNLTDWQSEVDFELPQNTLRRLIEATQFSMANQDARYFLNGMKFETEGNLLRTVATDGHRLAVCTISLEQELQNHSVILPRKGVLELVRLLETNDEPARLQIGTNNLRVHLKNTVFTSKLIDGRFPDYRRVLPSNATKIVEGNWEMLKQAFVRASILSNERARSVRLSFKENQLKITASNTEHEEAEEIVDVNYNGEELEVGFNVTYILDVLNALKCNQVRMCLTDAFSSCLIENCEDSSCEYVIMPMRL

SEQ ID NO: 2095 - DNA, 1365 bp, Haemophilus influenzae
gtgaatctctcaaatctttggcaaagttgcctgttacaacttcaagatcaagtttcagccagcgatcttagcacttggcttcgtcctttacaggctgatgtagtatcaaataaccacattgttttatatgcttctaatatgtttgtgaaaggttgggtggaaacccattatctcgcacaaatccagcaaatttgtcagacacttgcacaaaatcctgaactgcgtatttctttaaaagaaggggttaaacctgcacccaagatagtggaaagcacaccaaatacaacacttagatcagaaagtgcggtagattttcaaacagaatctaatacgccaataaaatttgaatctcatctcaatactaaacacttatttgataactttgttgaaggtaagtcgaaccaactggcacgtgcagtcggtcaaaaacttgctcaagcaccaggcgaaccttcggctaatcctttctttttatatggtggcactggtttagggaaaactcacttgttacacgccattggcaacggcattttagccaataaaccgaatgcacgtgtgctttatattcacgcaaataactttatgcagcatatggtaaaagcagtgcgtgataataaaatggatcaatttaaaaaattctatcgttctcttgatgcgcttttagtggatgatattcaatttttcgctgaaaaagaaaaaacccaagaagaattcttccatattttcaatagcttgtttgaaacgggtcgccaaattatcttaacttcagatcgttatcctaaagaaattgaaaaaattgaagaacgtttaaaatcacgttttggctggggcttaacaacagccattgagccgcccgatcttgaaacccgtgtagcgattttattgaaaaaagcggaagaacataatatgaacttgccagaagaagtcgctttcttcattgctcaacgcttgcgtaccaacgtgcgtgaacttgagggtgcattaaatcgtgtaaaagcaatgcaagacttcaaaggcggtgacattgatattgatttcgtgcgtgataccttaaaagatattttggctctgcaagaacgcttagttaccattgaaaatattcaaaaagtggtggctgaatattatcgaattaaggtttcagatttaaaatcaaaaagtcgtgcacgttcagtcactcgcccacgccaaattgctatggcgttagcaaaagaattaacaaaccgcagtttgcctgaaatcggtcgtgcatttgatcgtgatcacactactgtgttaaacgcttgccgagaagtgccaaaattccgcgagcaagacaatagcattcaagaagattgggcgaatttaatccgcactttgtctgcataa

SEQ ID NO: 2096 - protein, 454 aa, Haemophilus influenzae
MNLSNLWQSCLLQLQDQVSASDLSTWLRPLQADVVSNNHIVLYASNMFVKGWVETHYLAQIQQICQTLAQNPELRISLKEGVKPAPKIVESTPNTTLRSESAVDFQTESNTPIKFESHLNTKHLFDNFVEGKSNQLARAVGQKLAQAPGEPSANPFFLYGGTGLGKTHLLHAIGNGILANKPNARVLYIHANNFMQHMVKAVRDNKMDQFKKFYRSLDALLVDDIQFFAEKEKTQEEFFHIFNSLFETGRQIILTSDRYPKEIEKIEERLKSRFGWGLTTAIEPPDLETRVAILLKKAEEHNMNLPEEVAFFIAQRLRTNVRELEGALNRVKAMQDFKGGDIDIDFVRDTLKDILALQERLVTIENIQKVVAEYYRIKVSDLKSKSRARSVTRPRQIAMALAKELTNRSLPEIGRAFDRDHTTVLNACREVPKFREQDNSIQEDWANLIRTLSA

SEQ ID NO: 2097 - DNA, 2739 bp, Haemophilus influenzae
atgactaaaaaaccctattttcgcctaagtattatttcttgtcttttaatttcatgctatgtaaaagcagaaactcaaagtataaaagatacaaaagaagctatatcatctgaagtggacactcaaagtacagaagattcagaattagaaactatctcagtcactgcagaaaaaataagagatcgtaaagataatgaagtaactggacttggcaaaattatcaaaactagtgaaagtatcagccgagaacaagtattaaatattcgtgatctaacacgctatgatccagggatttcagttgtagaacaaggtcgcggtgcaagttctggatattctattcgtggtatggacagaaatagagttgctttattagtagatggtttacctcaaacgcaatcttatgtagtgcaaagccctttagttgctcgttcaggatattctggcactggtgcaattaatgaaattgaatatgaaaatgtaaaggccgtcgaaataagcaagggggggagttcttctgagtatggtaatggagcactagctggttctgtaacatttcaaagcaaatcagcagccgatatcttagaaggagacaaatcatggggaattcaaactaaaaatgcttattcaagcaaaaataaaggctttacccattctttagctgtagcaggaaaacaaggtggatttgaagggctagccatttacactcaacgaaattcaattgaaacccaagtccataaagatgcattaaaaggcgtacaaagttatgatcgattaatcgccacaacagataaatcttcaggatactttgtgatacaaggtgagtgtccaaatggtgatgacaagtgtgcagccaagccacctgcgactttatccacccaaagcgaaaccgtaagcgtttcagattatacgggggctaaccgtatcaaacctaatccaatgaaatatgaaagccagtcttggtttttaagaggagggtatcatttttctgaacaacattatattggtggtatttttgaattcacacaacaaaaatttgatatccgtgatatgacatttcccgcttatttaagcccaacagaaagacgggatgatagtagtcgttctttttatccaatgcaagatcatggtgcatatcaacatattgaggatggcagaggcgttaaatatgcaagtgggctttatttcgatgaacaccatagaaaacagcgtgtaggtattgaatatatttacgaaaataagaacaaagcgggcatcattgacaaagcagtgttaagtgctaatcaacaaaacatcatacttgacagttatatgcgacatacgcattgcagtctttatcctaatccaagtaagaattgccgcccaacacttgataaaccttattcatactatcgttctgatagaaatgtttataaagaaaaacataatatgttgcaattgaatttagagaaaaaaattcaacaaaattggcttactcatcaaattgtcttcaatcttggttttgatgactttacttcagcgcttcagcataaagattatttaactcgacgtgttatcgctacggcagatagtattccaaggaaacctggtgaaactggtaaaccaagaaatggtttgcaatcacaaccttacttatacccaaaaccagagccatattttgcaggacaagatcattgtaattatcaaggtagctcctctaattacagagactgtaaagtgcggttaattaaagggaaaaattattatttcgcagcacgcaataatatggcattagggaaatacgttgatttaggtttaggtattcggtatgacgtatctcgtacaaaagctaatgaatcaactattagtgttggtaaatttaaaaatttctcttggaatactggtattgtcataaaaccaacggaatggcttgatctttcttatcgcctttctactggatttagaaatcctagtttttctgaaatgtatggttggcggtatggtggcaagaatgacgaggtttatgtaggtaaatttaagcctgaaacatctcgtaaccaagagtttggtctcgctctaaaaggggattttggtaatattgagatcagtcattttagtaatgcttatcgaaatcttatcgcctttgctgaagaacttagtaaaaatggaactggaaagggcaattatggatatcataatgcacaaaatgcaaaattagttggcgtaaatataactgcacaattagattttaatggtttatggaaacgtattccctacggttggtatgcaacatttgcttataaccaagtaaaagttaaagatcaaaaaatcaatgctggtttagcctccgtaagcagttatttatttgatgccattcagcccagccgttatatcattggtttaggctatgatcatccaagtaatacttggggaattaatacaatgtttactcaatcaaaagcaaaatctcaaaatgaattgctaggaaaacgtgcattaggtaacaattcaagggatgtaaaatcaacaagaaaacttactcgggcatggcatatcttagatgtatcgggttattacatggcgaataaaaatattatgcttcgattagggatatataatttattcaactatcgctatgttacttgggaagcggtgcgtcaaacagcacaaggtgcggtcaatcaacatcaaaatgttggtagctatactcgctacgcagcatcaggacgaaactataccttaacattagaaatgaaattctaa

SEQ ID NO: 2098 - protein, 912 aa, Haemophilus influenzae
MTKKPYFRLSIISCLLISCYVKAETQSIKDTKEAISSEVDTQSTEDSELETISVTAEKIRDRKDNEVTGLGKIIKTSESISREQVLNIRDLTRYDPGISVVEQGRGASSGYSIRGMDRNRVALLVDGLPQTQSYVVQSPLVARSGYSGTGAINEIEYENVKAVEISKGGSSSEYGNGALAGSVTFQSKSAADILEGDKSWGIQTKNAYSSKNKGFTHSLAVAGKQGGFEGLAIYTQRNSIETQVHKDALKGVQSYDRLIATTDKSSGYFVIQGECPNGDDKCAAKPPATLSTQSETVSVSDYTGANRIKPNPMKYESQSWFLRGGYHFSEQHYIGGIFEFTQQKFDIRDMTFPAYLSPTERRDDSSRSFYPMQDHGAYQHIEDGRGVKYASGLYFDEHHRKQRVGIEYIYENKNKAGIIDKAVLSANQQNIILDSYMRHTHCSLYPNPSKNCRPTLDKPYSYYRSDRNVYKEKHNMLQLNLEKKIQQNWLTHQIVFNLGFDDFTSALQHKDYLTRRVIATADSIPRKPGETGKPRNGLQSQPYLYPKPEPYFAGQDHCNYQGSSSNYRDCKVRLIKGKNYYFAARNNMALGKYVDLGLGIRYDVSRTKANESTISVGKFKNFSWNTGIVIKPTEWLDLSYRLSTGFRNPSFSEMYGWRYGGKNDEVYVGKFKPETSRNQEFGLALKGDFGNIEISHFSNAYRNLIAFAEELSKNGTGKGNYGYHNAQNAKLVGVNITAQLDFNGLWKRIPYGWYATFAYNQVKVKDQKINAGLASVSSYLFDAIQPSRYIIGLGYDHPSNTWGINTMFTQSKAKSQNELLGKRALGNNSRDVKSTRKLTRAWHILDVSGYYMANKNIMLRLGIYNLFNYRYVTWEAVRQTAQGAVNQHQNVGSYTRYAASGRNYTLTLEMKF

SEQ ID NO: 2099 - DNA, 1800 bp, Haemophilus influenzae
atgaaattggtggctcagaatcttcgtggtaataaagaacctagtttcttaaatgaagatgactatatatcatatttttcctcactttctacgattgaaaaggatgttaaagataacaataaaaacggggcggaccttattggctcaatagacgagcctagtacaacaaatccacccgaaaagcatcatggacaaaaatatgtatattcagggctttattatactccatcgtggagtttaaacgattctaaaaacaagttttatttaggttactatggatatgcgttttattatggtaataaaactgcaacaaacttgccagtaaacggtgtagctaaatacaaaggaacttgggatttcatcactgcaactaaaaatggcaaacgttatcctttgttaagtaatggcagtcacgcttattatcgacgtagtgcaattccagaagatattgatttagaaaatgattcaaagaatggtgatataggcttaataagtgaatttagtgcagattttgggactaaaaaactgacaggacaactgtcttacaccaaaagaaaaactaataatcaaccatatgaaaagaaaaaactctatgatatagatgccgatatttatagtaatagattcaggggtacagtaaagccaaccgaaaaagattctgaagaacatccctttaccagcgagggaacattagaaggtggtttttatgggcctaatgctgaagaactaggggggaaatttttagctacggataaccgagtttttggggtatttagtgccaaagaaacggaagaaacaaaaaaggaagcgttatccaaggaaaccttaattgatggcaagctaattactttctctactaaaaaaaccgatgcaaaaaccaatgcaacaaccagtaccgcagctaatacaacaaccgatacaaccgccaatacaataaccgatgaaaaaaactttaagacggaagatatatcaagttttggtgaagctgattatctgttaattgacaaatatcctattccacttttacctgataaaaatactaatgatttcataagtagtaagcatcatactgtaggaaataaacgctataaagtggaagcatgttgcagtaatctaagctatgtgaaatttggtatgtattatgaagacccacttaaagaaaaagaaacagaaacagaaacagaaacagaaaaagacaaagaaaaagaaaaagaaaaagacaaagacaaagacaaagaaaaacaaacggcggcaacgaccaacacttattatcaattcttattaggtcaccgtactcccaaggacgacatacctaaaacaggaagtgcaaaatatcatggtagttggtttggttatattactgacggtaagacatcttactcccccagtggtgataagaaacgcgataaaaatgctgtcgccgagtttaatgttgattttgccgagaaaaagctaacaggcgaattaaaacgacacgatactggaaatcccgtatttagtattgaggcaaactttaataatagtagtaatgccttcactggtacagcaaccgcaacaaattttgtaatagatggtaaaaatagtcaaaataaaaataccccaattaatattacaactaaagtaaacggggcattttatggacctaaggcttctgaattaggcggttatttcacttataacggaaattctacagctacaaattctgaaagttcctcaaccgtatcttcatcatccaattcaaaaaatgcaagagctgcagttgtctttggtgcgagacaacaagtagaaacaaccaaataa

SEQ ID NO: 2100 - protein, 599 aa, Haemophilus influenzae
MKLVAQNLRGNKEPSFLNEDDYISYFSSLSTIEKDVKDNNKNGADLIGSIDEPSTTNPPEKHHGQKYVYSGLYYTPSWSLNDSKNKFYLGYYGYAFYYGNKTATNLPVNGVAKYKGTWDFITATKNGKRYPLLSNGSHAYYRRSAIPEDIDLENDSKNGDIGLISEFSADFGTKKLTGQLSYTKRKTNNQPYEKKKLYDIDADIYSNRFRGTVKPTEKDSEEHPFTSEGTLEGGFYGPNAEELGGKFLATDNRVFGVFSAKETEETKKEALSKETLIDGKLITFSTKKTDAKTNATTSTAANTTTDTTANTITDEKNFKTEDISSFGEADYLLIDKYPIPLLPDKNTNDFISSKHHTVGNKRYKVEACCSNLSYVKFGMYYEDPLKEKETETETETEKDKEKEKEKDKDKDKEKQTAATTNTYYQFLLGHRTPKDDIPKTGSAKYHGSWFGYITDGKTSYSPSGDKKRDKNAVAEFNVDFAEKKLTGELKRHDTGNPVFSIEANFNNSSNAFTGTATATNFVIDGKNSQNKNTPINITTKVNGAFYGPKASELGGYFTYNGNSTATNSESSSTVSSSSNSKNARAAVVFGARQQVETTK

SEQ ID NO: 2101 - DNA, 1461 bp, Haemophilus influenzae
atgaaaaatggcgtaaaacaaatttctttcttatcattaataggcttatcattaataggcttatcattaaccaatgtagcttgggcaaaagttgcacgtcctaaaaatgatacattgacaaatacaattcaaagtgcggaattaaaaacctcctctttttcttctatgcctaagaaagaaataccaaataggcatattatttctctttccaaaagccaattagcacaacatccaagacttgttttgcgtgggttaattcttgctttatatcaaaataacactcaggcagtgcaactgttattaccactatataaacaatttcctcagcaagataatttcttactcacttgggcaaaggctattgaagcgcgtgaacaaggcgatttaactcaatctattgcttattatcgtgaattattcgctcgagacgtatctttactacctttgcgttatcaattagctcaagccctattttttaactatgaaaatgaatctgccaaaattcaatttgaaaaattacgtacagaggtagatgatgaaaaatttttaggtgttattgatcagtatcttttaacactaaatcagcggaatcaatggatatggcaagtaggcttaaattttttaaatgatgataatttgaataacgctccaaaaagtggcacaaaaattggtaattggaccgcttgggaaaaagaaagtgggaagggggtagggtattctttatcagtagaaaaaaaatggccatgggcagatcatttttttagtaaaactatgtttaatgggaatggaaaatattattgggataataaaaaatacaatgaggctactttgcgtataggtggtggtttaggctatcaaactgccttagttgaagtctcgttgtttccttttcaagaaaaacgctggtatgcaggcggtagctctggaacgaatacaatgaagcaatatgcggataaattgggtattcgtttagaaaacgtagattggctaagtaaaacttggcaaatttctaccgcacttgagtatggaaaatctcgttataaaatccgaaaacatttagatggtaattattatttcatttcatcaacactattttatttacctaaaagcactcaattttggtttgttggcatggattttcatcgagaaaatacacaagcattagataatgcttatcaacaaaagacattgagatttggttgggggcaggattggtctcatggtatttcatcacgttttacttttagttatgccaaccgagtgtatagagagaaagatttgattgggatacagcaaaaaaatcgtgaatacacaaccacaattactttatggcatcgaaatatacattttatgggattaacacctaaattatcgtgggattatcaaaaatccactagtaatcatgctttttatcgttatgataaaaatagaatttatctcgaaattggaaaaatattttaa

SEQ ID NO: 2102 - protein, 486 aa, Haemophilus influenzae
MKNGVKQISFLSLIGLSLIGLSLTNVAWAKVARPKNDTLTNTIQSAELKTSSFSSMPKKEIPNRHIISLSKSQLAQHPRLVLRGLILALYQNNTQAVQLLLPLYKQFPQQDNFLLTWAKAIEAREQGDLTQSIAYYRELFARDVSLLPLRYQLAQALFFNYENESAKIQFEKLRTEVDDEKFLGVIDQYLLTLNQRNQWIWQVGLNFLNDDNLNNAPKSGTKIGNWTAWEKESGKGVGYSLSVEKKWPWADHFFSKTMFNGNGKYYWDNKKYNEATLRIGGGLGYQTALVEVSLFPFQEKRWYAGGSSGTNTMKQYADKLGIRLENVDWLSKTWQISTALEYGKSRYKIRKHLDGNYYFISSTLFYLPKSTQFWFVGMDFHRENTQALDNAYQQKTLRFGWGQDWSHGISSRFTFSYANRVYREKDLIGIQQKNREYTTTITLWHRNIHFMGLTPKLSWDYQKSTSNHAFYRYDKNRIYLEIGKIF

SEQ ID NO: 2103 - DNA, 135 bp, Haemophilus influenzae
atgaaacgtacatttcaaccttctgtattaaaacgtagtcgtactcacggtttccgtgctcgtatggcaactaaaaatggccgtcaagttttagcacgtcgccgtgctaaaggtcgtaaaagtttatctgcataa

SEQ ID NO: 2104 - protein, 44 aa, Haemophilus influenzae
MKRTFQPSVLKRSRTHGFRARMATKNGRQVLARRRAKGRKSLSA

SEQ ID NO: 2105 - DNA, 360 bp, Haemophilus influenzae
gtggttaagctgaacttttcaagggagttacgtttattaactcccgttcaattcaaaaatgttttcgaacagccattcagagctagtactcccgaaattacaatccttgctagaaaaaataatcttgaacatccgcgtttaggtttgaccgttgctaaaaaacatttaaaacgcgcccacgagcgtaatcgaattaaacgcttagtacgagaaagttttcgtttatcacagcattgcttgcctgcttatgattttgtttttgtagctaaaaatggtattggaaaactcgacaatagcacatttgcacaaatactcgaaaaattatggcagagacacattcgcttggcacaaaaatcttaa

SEQ ID NO: 2106 - protein, 119 aa, Haemophilus influenzae
MVKLNFSRELRLLTPVQFKNVFEQPFRASTPEITILARKNNLEHPRLGLTVAKKHLKRAHERNRIKRLVRESFRLSQHCLPAYDFVFVAKNGIGKLDNSTFAQILEKLWQRHIRLAQKS

SEQ ID NO: 2107 - DNA, 198 bp, Haemophilus influenzae
atgattagtccgtttattggggctcgttgtcggtttgtgcctacttgttcttgctatggtattgaagcattaaaaacacacggattattaaaaggtggttggcttacgctgaaacgtgtattaaaatgccatcctttaaacgcaggtggattcgatcctgttccaccaaaaaccaataataatgatgagaaaaaataa

SEQ ID NO: 2108 - protein, 65 aa, Haemophilus influenzae
MISPFIGARCRFVPTCSCYGIEALKTHGLLKGGWLTLKRVLKCHPLNAGGFDPVPPKTNNNDEKK

SEQ ID NO: 2109 - DNA, 1626 bp, Haemophilus influenzae
atggactcaagacgtagcctattagtgcttgcactgatttttatttctttccttgtttatcagcaatggcagttggataaaaatccacctgtgcaaactgaacaaacaacttcaataactgccacttctgacgttccggcaagttccccttctaattcacaagccatagcagactctcaaactcgtggtcgtattattactcttgaaaacgatgtgttccgtttgaaaattgatacattgggtggcgatgtaattagctctgaattattaaaatatgatgcagaattgaattcaaaaacaccgtttgaattattaaaagatactaaagagcatatttatattgcgcaaagtggtttaattggtaaaaacggtattgatacccgttctggtcgtgcgcaatatcaaattgaaggcgataattttaaattagcagaggggcaagaatctctttctgtaccgcttctttttgaaaaagatggcgtaacttatcaaaaaatcttcgtattaaaacgtggtagctatgatttaggcgtagattacaagattgataaccaaagtggtcaagctattgaagttgagccttatggtcaattgaagcattctattgttgaaagttctggtaatgttgcaatgcctacttatactggcggtgcatattcttcttcagaaactaactataaaaaatatagttttagtgatatgcaagataataatctttctattgatactaaagctggttgggttgcggtgttacaacattatttcgtttctgcgtggatcccaaatcaagatgtaaataatcaactttatacaattacagatagtaaaaataatgttgcatcaattggttatcgtggttctgttgtcactattcctgctggtagccaagagacgattacaagttcattgtggactggccctaaacttcaaaatcaaatggcaactgtcgcaaataatttagatttaactgttgattatggttgggcttggtttattgctaaaccgttattctggttattaacctttattcaagggattgtgtctaactggggtttggcgattatctgtgtaacaattgtagtgaaagcaattttgtatcctcttacaaaagcacaatatacttcaatggctaaaatgcgtattttgcaaccgaaaatgcaagaaatgcgtgaacgttttggagatgatcgccaacgtatgagccaagaaatgatgaaactttataaagaagaaaaagtaaatccacttggtggttgtttgccaattcttcttcaaatgccaattttcattgcattgtactggacgttcttagaagccgttgaattacgccacgcgccgttctttggttggattcaagacttatcggcacaagatccttattacattctccctattttaatgggtatctcaatgttcttgttgcaaaaaatgtcgccaacaccagtaactgacccaacacaacaaaaagtaatgaattttatgccattagtttttatgttctttttcttgtggttccctgctggtttagtgttgtattggttagtttccaacttaattacaatcgcccaacagcaattaatttatcgtggattagagaaaaaagggttgcattctcgtaagaaatag

SEQ ID NO: 2110 - protein, 541 aa, Haemophilus influenzae
MDSRRSLLVLALIFISFLVYQQWQLDKNPPVQTEQTTSITATSDVPASSPSNSQAIADSQTRGRIITLENDVFRLKIDTLGGDVISSELLKYDAELNSKTPFELLKDTKEHIYIAQSGLIGKNGIDTRSGRAQYQIEGDNFKLAEGQESLSVPLLFEKDGVTYQKIFVLKRGSYDLGVDYKIDNQSGQAIEVEPYGQLKHSIVESSGNVAMPTYTGGAYSSSETNYKKYSFSDMQDNNLSIDTKAGWVAVLQHYFVSAWIPNQDVNNQLYTITDSKNNVASIGYRGSVVTIPAGSQETITSSLWTGPKLQNQMATVANNLDLTVDYGWAWFIAKPLFWLLTFIQGIVSNWGLAIICVTIVVKAILYPLTKAQYTSMAKMRILQPKMQEMRERFGDDRQRMSQEMMKLYKEEKVNPLGGCLPILLQMPIFIALYWTFLEAVELRHAPFFGWIQDLSAQDPYYILPILMGISMFLLQKMSPTPVTDPTQQKVMNFMPLVFMFFFLWFPAGLVLYWLVSNLITIAQQQLIYRGLEKKGLHSRKK

SEQ ID NO: 2111 - DNA, 1431 bp, Haemophilus influenzae
atgtgcctttctttattttgctgccgtgggtatacctactctaggtctaccccaaacaataataggttttatatgaaagaaacaatcgttgctcaagctactgcaccaggtcgtggtggcattgggattttaagggtctctgggcctttagcaacaaaagttgctcaagctatattaggtaaatgcccgaagccaagaatggcagattatcttccttttaaagatgctgatggcactattttagatcaagggattgcgctttatttcaaatcgcccaattcatttactggtgaagatgtgttggaattgcaaggtcacggtgggcaggttgtattagatttattactcaaacgtattttacaaattgatggaatccgtttggcgagaccaggcgagttttctgaacaagcttttttgaatgataaattggatcttgctcaagcggaagcgattgcggatttaattgatgcaacatcagaacaagcggtacgctctgcattaaaatctttgcaaggtgaattttctaaaaaagtaaatgaattagttgattctgtgatttacttacgcacctatgtagaagcaagcattgactttcctgatgaagaaatagatttcttggcagatggaaaaattgaagcaaacttacgtggtattattaatcagttggaagatgttcgctctgaagctaaacaaggttctattttacgtgagggaatgaaagtcgtgattgctggtcgtccgaatgcaggcaaatcgagcttgcttaatgcccttgctggtcgcgaagcagctatcgtcacggatattgcaggtacaacccgtgatgtattgcgtgagcatattcatattgacggtatgccattgcatattattgataccgcaggtcttcgagatgcaaccgatgaagtagagcgtattgggatttctcgtgcttggacagagattgaacaagccgatcgtattattttaatgttagatagtagcgatcctgaaagtgcagatttaagcaaagtgcggtcagaatttttagcaaaattaccctcaaccttgccagttactattgttcgaaacaaaattgatttaaatggcgaacaagcaagtgaaagcgaacagggcggttatcaaatgattagtctttccgctcaaacgcatgatggtgtacaacttttacgtgaacatttgaaacaagcaatgggtttccaaacaggcatggaaggaggctttttagctcgccgccgtcatttagatgcgttggataaagccgcagagcatttacaaatcggtttggttcaacttacagaatttcacgcaggagaacttttagcggaagaattacgcttagttcaaagctatttaagtgaaattacgggtcaattcacatccgatgatttacttggtaatatttttagctctttctgtattggaaaatag

SEQ ID NO: 2112 - protein, 476 aa, Haemophilus influenzae
MCLSLFCCRGYTYSRSTPNNNRFYMKETIVAQATAPGRGGIGILRVSGPLATKVAQAILGKCPKPRMADYLPFKDADGTILDQGIALYFKSPNSFTGEDVLELQGHGGQVVLDLLLKRILQIDGIRLARPGEFSEQAFLNDKLDLAQAEAIADLIDATSEQAVRSALKSLQGEFSKKVNELVDSVIYLRTYVEASIDFPDEEIDFLADGKIEANLRGIINQLEDVRSEAKQGSILREGMKVVIAGRPNAGKSSLLNALAGREAAIVTDIAGTTRDVLREHIHIDGMPLHIIDTAGLRDATDEVERIGISRAWTEIEQADRIILMLDSSDPESADLSKVRSEFLAKLPSTLPVTIVRNKIDLNGEQASESEQGGYQMISLSAQTHDGVQLLREHLKQAMGFQTGMEGGFLARRRHLDALDKAAEHLQIGLVQLTEFHAGELLAEELRLVQSYLSEITGQFTSDDLLGNIFSSFCIGK

SEQ ID NO: 2113 - DNA, 1869 bp, Haemophilus influenzae
atgttaattgaaaaaatgcacaatttaacaaactcaaagatttctaaatttatcttaggtttgattgctgtatcgtttttagttggtggaatgtctggctatctttttagctcaaatgatacctatgcggcaaaagtgaacggcgaagtaatttctcaacaagattttttaaatcgctataatcaagaatttgaaatacgcgcacaacgtgagggagaggcgtttgtggctcagtctgattctcctgaatttgttaccgcacttcgtcaaaacatcgttaatctaatgattgatcaagaattacttcgccaatatgttaaagaattaaaattaggcgtgagtgatgaaatgattaaacgtgcaatcgtgaccgatcctaattttcaagtaaagggtaaatttgataatgctgtttatcaacgaatattacaacaaaatcatttaacttcagatggttacgcttcaattttgcgtgcttcgttacctcttgaacaaatacaaaatggcgttgctaacagtgaatttattgttcctgctcaagtaaaaaatagtgcagaaattttctttcaaaagcgtttagctcgtttagcaactttatctcttgcagatgaaatggcaaaacaatcagtctctgatgatgaaatcaaaacgtattatgaagctaatcaaaagtcttttgttcagccagagcaggttaaagttcagtatattgatctttctgcagataacatcagtagaaatcttcaagttacagatgtagaaattgcgcaatattatcaagataataaagcacaatttatgactcaacatttagcacatattcaatttgcaaatgaacaagatgcgaaagtggcttacgaggaattacagaaaggggcaaatttcgctgatgtcgctaaagcgaaatctttggataaaatttctggtgagaatggcggggatttaggctgggtaaatgagaatgaattaccaaaagcctttgaagatgccgcagctgcattgcaggtagggcaatatagccaaccaatcaatgtggatggcaattaccatattgtgttagtgcaagaacgtaaagcgcaaagtttggagaatgtgaaagctcaaattgcagatttagttcgtaaatctttgatggagagtcgttatttttctttagaaaaacaagcgagtgataaggcttttgaagacagtaagtctcttaatactgcagcacaagcagcaggtgttaaggttcaagagagtgattatttttctcgtcaaaatgtgccagctggattaaatttccctaatgttatttacacaatattcgaatcagatactacgaatgttggtatgaattctgaaccaattaatgtaggcgattatcacacaattattgtacgtgtgttggatcgcaaagcagagggcgtaaaaagtttagaagaggctaaaatagatattgaaactttcttaaaacgtcagaaagctgagaatgcgcttaatgaaaaagcacaacaagcagtgaaaaaattaaatgaaaaccctgaatcaaaagtagatggcattaatttctcaagtgagcagacttttactttaagtgaaagtaaagatcctattttaacaaatggcatattttcaattgctaaacctgaatcaagtaaagctctttatcaagtggtgcataattcaaatggcgatgtcgttgttgtcgctttgaataaggttgaacaaggcagtttaagtgaaaaagaattgtcgcaatttggtctgcaattattgcgtagtcatcaatctgaattacaagttcagttaatacaaggattacgtgagagagcgaaaattgaggtaaatgattctttcatcaatcaagatgatgaagcacaacaatag

SEQ ID NO: 2114 - protein, 622 aa, Haemophilus influenzae
MLIEKMHNLTNSKISKFILGLIAVSFLVGGMSGYLFSSNDTYAAKVNGEVISQQDFLNRYNQEFEIRAQREGEAFVAQSDSPEFVTALRQNIVNLMIDQELLRQYVKELKLGVSDEMIKRAIVTDPNFQVKGKFDNAVYQRILQQNHLTSDGYASILRASLPLEQIQNGVANSEFIVPAQVKNSAEIFFQKRLARLATLSLADEMAKQSVSDDEIKTYYEANQKSFVQPEQVKVQYIDLSADNISRNLQVTDVEIAQYYQDNKAQFMTQHLAHIQFANEQDAKVAYEELQKGANFADVAKAKSLDKISGENGGDLGWVNENELPKAFEDAAAALQVGQYSQPINVDGNYHIVLVQERKAQSLENVKAQIADLVRKSLMESRYFSLEKQASDKAFEDSKSLNTAAQAAGVKVQESDYFSRQNVPAGLNFPNVIYTIFESDTTNVGMNSEPINVGDYHTIIVRVLDRKAEGVKSLEEAKIDIETFLKRQKAENALNEKAQQAVKKLNENPESKVDGINFSSEQTFTLSESKDPILTNGIFSIAKPESSKALYQVVHNSNGDVVVVALNKVEQGSLSEKELSQFGLQLLRSHQSELQVQLIQGLRERAKIEVNDSFINQDDEAQQ

SEQ ID NO: 2115 - DNA, 1557 bp, Haemophilus influenzae
atgttcgggaaaaaaataattcattctaaaacaatatggttttattttttattgtttctcttttctatatttaccaatatgggattaggcaatgtattaagtgagaatattcctgtttcagattacgcaattttatttgttatcacggcgatttctttttattttaccccttgggttgggcgaatattaatcactgtattattcctcagcgcgttattttattgctctgctggttttttctatggtattccatctttgggtattatcgcttctgtttatgaaacgaatattaatgaaaccttggaatactacacaaccattcctttttggatatttttatttcaagctagttatatcattttgtttgttattttaatgaaattaagttttcatgttaaacaacaagcatttaaatggctaaatacggctgttatcagcctattattagttttttcttacaatcaattttctgattggaactatgcgtataaattccgtttttatcccgttcttttttattctgaatttgatcgaatgaatgatctgtatttagaacaacgtgattttctaaatcaatccgttaatgcaccttctcaatgggatattcaatcttttatgccaaaatataaaaattatattttgattatcggtgaaagcatgcgaaaagattatatgtcgttatatggctttccattgaaaaccacaccatttttagagcgtgtgaaaggcactgtttttgaaaattattattctgcagcaccgaatacgcaaccgtctttacaactcaccctatatcgagcagataaaggggaaacggtttatacggataatattatttctttagccaaaaaagcgggtgtgaaaacctattggatttctaatcaaggcaaaattggggaatttgatacgatcgcatctcgtattggtcaaagtgcagatgaaacgatttttatgaagccgttaggttataactctaaaaaagtttatgacgatgaaatgttgcctgtattagataaagccttaaaagaaaatattagcaattcaaaattaattgtgattcatttaataggctcacatcctgctttttgtgagcgtcttccatacgaggttaaaaattattttattaatcaatcgatgtcttgttatttagaatcaattaaatatacggatcagtttttagaaaaattaaattcacaattggtggcacaaaatgaaccctattcggtgatttacttttctgatcatgggcttgctcattatgaggattctaacggcctatcattgcatccaaataatctttataaacaagattatgaaattcctttcataatgttttcgagtgatagtcaaaaggtagaaaaaataaaaacgccacaatcggcatttaattttgtttatggttttgctgattggatgggaattaaggaaaaacatttacaaggcgtggatttcttccatcctgaaaaacaggaaattaaggtatttgattggaataacgttgtaaatgttaaagagttggctgatgatccagcaaaattaccagaaaccgttcagtaa

SEQ ID NO: 2116 - protein, 518 aa, Haemophilus influenzae
MFGKKIIHSKTIWFYFLLFLFSIFTNMGLGNVLSENIPVSDYAILFVITAISFYFTPWVGRILITVLFLSALFYCSAGFFYGIPSLGIIASVYETNINETLEYYTTIPFWIFLFQASYIILFVILMKLSFHVKQQAFKWLNTAVISLLLVFSYNQFSDWNYAYKFRFYPVLFYSEFDRMNDLYLEQRDFLNQSVNAPSQWDIQSFMPKYKNYILIIGESMRKDYMSLYGFPLKTTPFLERVKGTVFENYYSAAPNTQPSLQLTLYRADKGETVYTDNIISLAKKAGVKTYWISNQGKIGEFDTIASRIGQSADETIFMKPLGYNSKKVYDDEMLPVLDKALKENISNSKLIVIHLIGSHPAFCERLPYEVKNYFINQSMSCYLESIKYTDQFLEKLNSQLVAQNEPYSVIYFSDHGLAHYEDSNGLSLHPNNLYKQDYEIPFIMFSSDSQKVEKIKTPQSAFNFVYGFADWMGIKEKHLQGVDFFHPEKQEIKVFDWNNVVNVKELADDPAKLPETVQ

SEQ ID NO: 2117 - DNA, 516 bp, Haemophilus influenzae
atgtccaaaaaatcagggctttcgtttttatggttaagtgcggtcgctttcgtggttgatttgctcactaaatacattgtggtacaaaaatttgatttgtatgaaagtgttaatgtgctgcctgttttcaatcttacctatgttcgcaattatggtgcggcatttagtttcttagcggatcatagtggctggcaacaatatttctttattttgttggcattggctatttcaggcatgttggtttattttttagcaaaaaataatgccgaacaaaaaatccaaaattctgcttatgcactgattattggtggggcgttagcgaatatggtggatcgtgcttataacggttttgtcgtggatttctttgatttctactgggatatttaccattatccagtgtttaatatcgccgatatcgccatttgtattggcgcagggttattagtattagatgcgtttaagagcgaaaagaaaaaagtacaagataaacaagtagaaaagtgcggtcaaaaatga

SEQ ID NO: 2118 - protein, 171 aa, Haemophilus influenzae
MSKKSGLSFLWLSAVAFVVDLLTKYIVVQKFDLYESVNVLPVFNLTYVRNYGAAFSFLADHSGWQQYFFILLALAISGMLVYFLAKNNAEQKIQNSAYALIIGGALANMVDRAYNGFVVDFFDFYWDIYHYPVFNIADIAICIGAGLLVLDAFKSEKKKVQDKQVEKCGQK

SEQ ID NO: 2119 - DNA, 945 bp, Haemophilus influenzae
atgaagataattttagccaatccacgaggattttgtgccggtgtagatcgtgccattagtattgttgaattagccttagaaattcatggcgcaccgatttatgttcgtcacgaagtggtacataaccgatttgttgtgaacggattgcgtgagcgtggtgcgatctttgtggaagaattaagtgaagtgcctgatggcgccatcgtgattttttctgcacacggagtgtctcaagcggttcggcaagaagcgaaagaccgcaatctcaaagtatttgatgcaacctgtcctttggtgactaaagtgcatatgcaggttgcgcgtgcaagtcgaaagggtacaaaagcgattttgattgggcataaagggcatcctgaagttgaaggcacaatggggcagtatagcaatgaagatggcggtattttcctaattgaaaaagtagaagatattgcgcgtttgccaatgcaagaaaatgataatttaacctttatgacgcaaacgacgttgtcgctagatgatacggctgaaactattgctgcattaaaggaaaaatatcccgctattcaaggaccacataaaaacgatatttgttatgcgacaactaatcgtcaagaagcggtgcgtgaattagcaaaattatcagatttagtgttggttgtaggttctaaaaattcatccaattcaaatcgtttagctgaattggcttctcgaatgggggttaaatcacagcttcttgatgatcctgccgatattcaagccgattggtttaatgatgtaaaaaccattgggattacagctggtgcttctgcgccagaggaattagttcaatcaattatttctcgtttaaaaaggtttggtgcgaattccatagaagaactgcaaggtttagaagaaaatatgttctttgaggtgccaaaagagctgagaataaaagaagttaattaa

SEQ ID NO: 2120 - protein, 314 aa, Haemophilus influenzae
MKIILANPRGFCAGVDRAISIVELALEIHGAPIYVRHEVVHNRFVVNGLRERGAIFVEELSEVPDGAIVIFSAHGVSQAVRQEAKDRNLKVFDATCPLVTKVHMQVARASRKGTKAILIGHKGHPEVEGTMGQYSNEDGGIFLIEKVEDIARLPMQENDNLTFMTQTTLSLDDTAETIAALKEKYPAIQGPHKNDICYATTNRQEAVRELAKLSDLVLVVGSKNSSNSNRLAELASRMGVKSQLLDDPADIQADWFNDVKTIGITAGASAPEELVQSIISRLKRFGANSIEELQGLEENMFFEVPKELRIKEVN

SEQ ID NO: 2121 - DNA, 141 bp, Haemophilus influenzae
ttgatcagcaatcaacacacctattttttcctgccttgcaaaaaccctcaagaaactgaccgcacttttgcgatctcgatcgcaaaaattcttaatttgaatgaaaaaacaaagggcttatcatttacgacaagcccttag

SEQ ID NO: 2122 - protein, 46 aa, Haemophilus influenzae
MISNQHTYFFLPCKNPQETDRTFAISIAKILNLNEKTKGLSFTTSP

SEQ ID NO: 2123 - DNA, 348 bp, Haemophilus influenzae
atgaaattaatgaaaacattattcacttcggttgtattgtatggttcgctggttgtttcttcgtcttttgctgaggaaaaagcgacagaacaaaccgctcaatctgttgtaacaactcaagctgaagctcaagtagcaccagccgtagtgagcgataaattgaatatcaacacagcaactgccagtgaaattcaaaaatccctaactggcattggtgcgaaaaaagcggaagctattgtgcaatatcgtgaaaaacacggtaattttactaatgcagaacagcttttagaagtacaaggaattggcaaagcaacactagagaaaaatcgtgatcgtataatcttttaa

SEQ ID NO: 2124 - protein, 115 aa, Haemophilus influenzae
MKLMKTLFTSVVLYGSLVVSSSFAEEKATEQTAQSVVTTQAEAQVAPAVVSDKLNINTATASEIQKSLTGIGAKKAEAIVQYREKHGNFTNAEQLLEVQGIGKATLEKNRDRIIF

SEQ ID NO: 2125 - DNA, 759 bp, Haemophilus influenzae
atgattcctgcagaacggcaaaagacattattaaacttaattagtaaacaaagcgttattagtataaataacttagtcaatatcttaggcgtatcgcatatgaccgtacgtcgtgatatacaaaagctcgaagaggatggaaaagtcatctctgtttcagggggggttcaattacttgaacgtttatccagtgaaccaacacatgacgataaatcattactagcaacgactgaaaagacggctattagtaaaaaagcagttgagttaatacaagaacattccactatatatctagatgctggcacgacaacacttgaaatcgcaaaacaaatcgctaatcgaaacgatctacttgtaattactaatgattttgttattgcccattatttaatggtcaatagccaatgtaatattatgcatactggtgggctcattaataaatcaaatcgttcctctgtgggagaatttgctgcccaatttctacatcaaatttcagttgacattgcgttcatctcgacttcatcttggaatttaaaagggctaaccacgcctgatgagcaaaaaattcctgtcaaaaaagctattatccaatttagtcaaaaaaatatccttgttactgattcatccaaatatggcaaagtagcaacatttctactatatccacttagttcactagatacgattatctgtgataaaggattacccgaaaatgctcaagctagaatcgctgaaatgaatgttgaattatttttagtataa

SEQ ID NO: 2126 - protein, 252 aa, Haemophilus influenzae
MIPAERQKTLLNLISKQSVISINNLVNILGVSHMTVRRDIQKLEEDGKVISVSGGVQLLERLSSEPTHDDKSLLATTEKTAISKKAVELIQEHSTIYLDAGTTTLEIAKQIANRNDLLVITNDFVIAHYLMVNSQCNIMHTGGLINKSNRSSVGEFAAQFLHQISVDIAFISTSSWNLKGLTTPDEQKIPVKKAIIQFSQKNILVTDSSKYGKVATFLLYPLSSLDTIICDKGLPENAQARIAEMNVELFLV

SEQ ID NO: 2127 - DNA, 810 bp, Haemophilus influenzae
  misc_feature 4, 5, 6, 7, 8: n is any nucleotide
atgnnnnntttaaacccagttgcacttgaaaaactaaaagcggcaggtgcaaaagctgtagcggcaaatggctatgacttcgctcacgaacttgatgctgtagtgattttagtggttaatgcagcccaagctaacgcagtattatttggcgaaaatggtattgctaaaaaattaaaagcaggtacagcggtgatggtttcttctaccatggcggctcaagatgctcaaataatttcacaaaaattaacagaattaggtttgattatgttagatgcacctgtttctggtggtgcagctaaagcattaaaaggtgaaatgactgttatggcatcgggttcaaaacaagcatttgagttgttacaacctgttttagatgccactgcggcaaaagtttataacattggtgaagaaattggtttaggtgcaacggtgaaaatcgtccatcaattattagctggcgtacatattgcagcaggtgcggaagctatggctcttgcctcaaaagcgggtattccacttgatgttatgtatgatgttgtgaccaatgcagctggtaactcttggatgtttgaaaaccggatgaaacacgtagtagaaggtgactatacgccgctttctatggttgatatttttgtgaaagatttaggtttagttaatgacactgcaaaatcacttcatttcccacttcatttggcaagcacagcctattctatgttcactgaggcaagcaatgcgggttatggtaaagaagatgatagtgcagtgattaaaatttttagtggcgttaacttaccgaaaaaaggagcgtag

SEQ ID NO: 2128 - protein, 269 aa, Haemophilus influenzae
  VARIANT 2, 3: Xaa is any amino acid
MXXLNPVALEKLKAAGAKAVAANGYDFAHELDAVVILVVNAAQANAVLFGENGIAKKLKAGTAVMVSSTMAAQDAQIISQKLTELGLIMLDAPVSGGAAKALKGEMTVMASGSKQAFELLQPVLDATAAKVYNIGEEIGLGATVKIVHQLLAGVHIAAGAEAMALASKAGIPLDVMYDVVTNAAGNSWMFENRMKHVVEGDYTPLSMVDIFVKDLGLVNDTAKSLHFPLHLASTAYSMFTEASNAGYGKEDDSAVIKIFSGVNLPKKGA

SEQ ID NO: 2129 - DNA, 1242 bp, Haemophilus influenzae
atgttaggtgttattgcagatgattttacaggcgcaagcgatatcgccagttttttggttgaaaatggcttaagtacggtgcaaatgaacggtgttccaacacaatcgttaaacagcaaagtagatgccattgtgatcagtctaaaatcacgttccaaccctgtgaatgaagccattgaacagtcattgagggcttatcaatggttaaaggaaaatggttgtacgcaattttattttaaatattgttctacctttgacagtacagcgaaaggcaatatcggtcctgtcacggatgctttactagatgaattaaatgaagatttcaccgttattacaccagccttacctgtaaatggtcgcactatttttaacggctatttattcgtaggtgatgtattgttgagtgaatcaggcatgaaaaaccacccgattacaccaatggtggacgcaaatttaatgcgtttaatggatgcacaagccaaaggcaaaacaggtttggtggcgtatgctgatgtgattaaaggggcttcgcgtgtgcaagagcgctttgcggaattaaaagcacaaggctaccgttatgcggttgttgatgctgtggataattcgcagttggaagtacttgctgaagcagtggcggatttcaaattggtgacaggcggttcaggcttaggagcttatatggctgcacgtttaagtggtggcaaaaaaggcaccaatgcctttacgccaactaaaggtaaaaccgtggtgctttcagggtcttgctcagtaatgaccaataaacaagtggaaaaatatcgtgaaaaagcaccgcactttcaacttgatgttgagcaagccatccataatgaaaattatatagaacaactttatcagtgggtaatagcaaatctcgatagcgaatttgcccctatggtctatgcaacagtgccaccagatgcattaaaagctattcaacatcaatttggggtggatcaagcaagccatgccattgaaagcactttcgccaaacttgccgataaattaaaacaatatggcgtaacaaactttattactgctggtggtgaaacctcaagtattgtggtgcaacaacttgattttactgggttccatattggtaaacaaatcgccccgggtgtgccttggttaaaagcggtagaagaagatattttccttgcgcttaaatcaggcaatttcggcaaagaagacttttttgaatatgcacaaggaatgttcctatga

SEQ ID NO: 2130 - protein, 413 aa, Haemophilus influenzae
MLGVIADDFTGASDIASFLVENGLSTVQMNGVPTQSLNSKVDAIVISLKSRSNPVNEAIEQSLRAYQWLKENGCTQFYFKYCSTFDSTAKGNIGPVTDALLDELNEDFTVITPALPVNGRTIFNGYLFVGDVLLSESGMKNHPITPMVDANLMRLMDAQAKGKTGLVAYADVIKGASRVQERFAELKAQGYRYAVVDAVDNSQLEVLAEAVADFKLVTGGSGLGAYMAARLSGGKKGTNAFTPTKGKTVVLSGSCSVMTNKQVEKYREKAPHFQLDVEQAIHNENYIEQLYQWVIANLDSEFAPMVYATVPPDALKAIQHQFGVDQASHAIESTFAKLADKLKQYGVTNFITAGGETSSIVVQQLDFTGFHIGKQIAPGVPWLKAVEEDIFLALKSGNFGKEDFFEYAQGMFL

SEQ ID NO: 2131 - DNA, 633 bp, Haemophilus influenzae
atgacggatttagcacaaaaagaattaatggtgcagctcggacgttctttttatgagcgaggttacaccgtgggcggtgcaggtaatttatcagttcgcttagatgacaatcgtgtgttagtgacccctacaggttcttcactcggtcggttaagtgtagaacgtttatctgtattggatatggaaggtaatcttttagggggcgataaaccatcgaaagaagcagtatttcatttggctatgtacaagaaaaatcctgagtgcaaagccattgtgcatttacatagtacctatttgaccgcactttcttgcttagataatttggatcctaataatgctatagagccatttacaccgtattacgtaatgcgcgtgggaaaaatgcaagttattccctactatagaccgggttcaccaaagattgcagaagaattaagtaacagagctttaacaggcaaagccttcttactcgctaatcatggtgttgttgtcactggctcagatttgcttgatgcggcagataatacagaagagttagaagaaaccgcaaaattattcttcactttgcaaggacaaaaaatccgctatctcactgataccgaagtgaaagatttagaaaatagaggaaaataa

SEQ ID NO: 2132 - protein, 210 aa, Haemophilus influenzae
MTDLAQKELMVQLGRSFYERGYTVGGAGNLSVRLDDNRVLVTPTGSSLGRLSVERLSVLDMEGNLLGGDKPSKEAVFHLAMYKKNPECKAIVHLHSTYLTALSCLDNLDPNNAIEPFTPYYVMRVGKMQVIPYYRPGSPKIAEELSNRALTGKAFLLANHGVVVTGSDLLDAADNTEELEETAKLFFTLQGQKIRYLTDTEVKDLENRGK

SEQ ID NO: 2133 - DNA, 777 bp, Haemophilus influenzae
atgcctaaatttgcagcaaacttaacaatgatgtttaacgaagtaccatttttagatcgctttgaagcggcggctaaagcaggctttaaatatgtcgaattcttatggccttatgattaccctgcacaagaactcaaagcaattttagataagcatggcctaaaagttgtgttatttaataccccagctggtgatgtaaacaaaggtgaatggggtgtttcggcaatccctggccgagaagctgatagccatagagatattgatttggctcttgaatatgcacttgcattaggttgtccaaatgtacatatcatgtcagcagttgtgccagaaggtgcaagccgtgaagaatataaacaaacctttattaaaaacgtacgctatgcatctgataaatataaaccatatggaatcaaaattcagcttgaagctttaagccctgaagtgaaacctaattatttactcaaaagccaatttgatacgcttgaagtggtggaattggttgatcgtgataatgtatttgttcaactcgactattttcatgcacaaaatgtagatggcaatcttgcgcgtttaaccgataaattaaatggcaaatttgctcacgttcaaattgcttctgtaccagaccgtcatgaacccgacgaaggtgaaattaactaccaatatatcttcgataaactagatgaaatcggttatacaggctatgttggctgtgaatataaaccacgtggtgaaaccgtaacgggattggattggtttcagaagtataaataa

SEQ ID NO: 2134 - protein, 258 aa, Haemophilus influenzae
MPKFAANLTMMFNEVPFLDRFEAAAKAGFKYVEFLWPYDYPAQELKAILDKHGLKVVLFNTPAGDVNKGEWGVSAIPGREADSHRDIDLALEYALALGCPNVHIMSAVVPEGASREEYKQTFIKNVRYASDKYKPYGIKIQLEALSPEVKPNYLLKSQFDTLEVVELVDRDNVFVQLDYFHAQNVDGNLARLTDKLNGKFAHVQIASVPDRHEPDEGEINYQYIFDKLDEIGYTGYVGCEYKPRGETVTGLDWFQKYK

SEQ ID NO: 2135 - DNA, 948 bp, Haemophilus influenzae
atgaaagtcgtaattactggtggacaagggttcttagggcaacgtttagccaaaacgctattagcccagaataatgttcatattgatgatttaattttaattgatgttgttaagcctattgcgccaaataatgatcctcgtgttcgatgttatgaaatggatttacgttatccaacaggattagatgaattaattactgaagaaacggatgctatttttcatttagcggctatcgtaagtagtcatgcagaacaagatcctgatttaggttatgaaattaatttcttagcaacacgaaatatccttgaaatttgtcgcaaaaataatcctaaagtgcggtttattttctctagttctttagccatatttggtggagaactacctgaaactattttagacagtacagcattcacaccgcaatctacctatggtacacaaaaagcaatgtgtgaattgctgattaatgattactcacgaaaaggctttgtagatggtattgttgttcgtttaccaaccatttgtattcgaccaggcaaaccaaacaaagctgcatcctcatttgttagcagtattatgcgtgaacctctacatggggaggatgccgtgtgtcctgtatcggaagaattacgtttatggttatctagcccaaatacagtagttgcaaactttattcatgctttacaacttccatcacttccattgcgtagttggcatactattaatcttccagggtttagtgttaccgtaaaacaaatgttatctgatctcactcaagtaaaaggtgaagcaattttagaacatattaaatttgagttcgatgaaagcattaacaatatcgttgctagttggccttcaagaattgataacacccaggcattagctcttggtttcaaagtggatagcaatttccaaaatgttatccaacagtttattgaatatgatatgtag

SEQ ID NO: 2136 - protein, 315 aa, Haemophilus influenzae
MKVVITGGQGFLGQRLAKTLLAQNNVHIDDLILIDVVKPIAPNNDPRVRCYEMDLRYPTGLDELITEETDAIFHLAAIVSSHAEQDPDLGYEINFLATRNILEICRKNNPKVRFIFSSSLAIFGGELPETILDSTAFTPQSTYGTQKAMCELLINDYSRKGFVDGIVVRLPTICIRPGKPNKAASSFVSSIMREPLHGEDAVCPVSEELRLWLSSPNTVVANFIHALQLPSLPLRSWHTINLPGFSVTVKQMLSDLTQVKGEAILEHIKFEFDESINNIVASWPSRIDNTQALALGFKVDSNFQNVIQQFIEYDM

SEQ ID NO: 2137 - DNA, 1467 bp, Haemophilus influenzae
atgtttggcttaccgattccaattattggattattaatcgctgtatttgttctcgtttttctcgtattaagaacgcgagttcatgctttcatcgcaatgctaattgcagcttcaattgcaggtttagtaggtggtatgtcagctgatgaaaccttaaattccatcacaaaaggatttggtggcacactaggtagtattgggattgttatcggacttggtgtaatgatgggtagcgtcttagaagtttctggtgcggcagaaaaaatggcatatagttttatcaaaatgctaggtcagaaaaaagaagaatgggcattagctattacaggttacgtagtgagtattccaattttcgtagattctgcatttgttatcctttatccagtagcaaaagctctcgcaaaaaatggtaaacgctcattattaactctaggcgttgctttggctggtggcttggttgtgacacaccacaccgttccaccaacaccaggtccattgggagtagctgggttatttggtgtagatattggtgcaatgttactcactggaatatgtatggctgtcttgcctgttgtaggaatagttctgtatgctaaatggttagataaaaaataccctaactttaatcaagaagtgttcacggaagaagaattaaaacaaaaatatgatagttatattgaaagtcgtgagaaaaaagaacttcctagtttagggctttctttactaccaattgtattaccgatagtattaatctttattaaagcagttgtacatttattcgttaaagatgtacctgaagcattgacaagtataccttatcaaatcgtttcattccttggtcaccctgttattgctttagcattaagcgtattaatttctgtttacacattattaccaaaagctgataaaaatacgactgcacttcatcttgaagaaggtgttaaaacagctggtattatcttattagtaacaggtgcgggtggtgcattaggtgcggtattacgcgatagtggtgctggaaaacaattagcagaacagatcgcaaacttacctatttcaccaattttaattccatttatcgtatcgactttagtgcgttttattcaaggttcaggtacggttgcaatgattacagctgcttcaatttcatccccaatccttgcacaaatacctggtgtcaatatgctattagccgctcaagctgctaccatgggatcgcttttctttggctatttcaatgatagtttattctgggtggttaaccgtatgatgggaattaatgatgtgaaaaaacaaatggtcgtttggtctgtaccaaccacgattgcttgggggattggtggtatttcagtaattcttgctaacttgatttttggcaacgatggctctgtatttgatctgcttttccctgttgtcgtgttagccagcattttattctatatcaaatttcagaataaaaatctttaa

SEQ ID NO: 2138 - protein, 488 aa, Haemophilus influenzae
MFGLPIPIIGLLIAVFVLVFLVLRTRVHAFIAMLIAASIAGLVGGMSADETLNSITKGFGGTLGSIGIVIGLGVMMGSVLEVSGAAEKMAYSFIKMLGQKKEEWALAITGYVVSIPIFVDSAFVILYPVAKALAKNGKRSLLTLGVALAGGLVVTHHTVPPTPGPLGVAGLFGVDIGAMLLTGICMAVLPVVGIVLYAKWLDKKYPNFNQEVFTEEELKQKYDSYIESREKKELPSLGLSLLPIVLPIVLIFIKAVVHLFVKDVPEALTSIPYQIVSFLGHPVIALALSVLISVYTLLPKADKNTTALHLEEGVKTAGIILLVTGAGGALGAVLRDSGAGKQLAEQIANLPISPILIPFIVSTLVRFIQGSGTVAMITAASISSPILAQIPGVNMLLAAQAATMGSLFFGYFNDSLFWVVNRMMGINDVKKQMVVWSVPTTIAWGIGGISVILANLIFGNDGSVFDLLFPVVVLASILFYIKFQNKNL

SEQ ID NO: 2139 - DNA, 285 bp, Haemophilus influenzae
gtgatacgttgtacagatataaatgagataacaccatttagcagttttatctctaaaataccaaatcattgcggtacacatatggatgcgtcacgccactttgtaaaagatggtttaagtatcaatgaactgccaattgggtatttttgccataaggatgttgtattacttgaagttccaaaaggcgaagcggaagggattacgaaagaagatttagagccttatgcggatattttagcacaagtatcctttgctttcttacgcacagggtttgagaagaactga

SEQ ID NO: 2140 - protein, 94 aa, Haemophilus influenzae
MIRCTDINEITPFSSFISKIPNHCGTHMDASRHFVKDGLSINELPIGYFCHKDVVLLEVPKGEAEGITKEDLEPYADILAQVSFAFLRTGFEKN

SEQ ID NO: 2141 - DNA, 174 bp, Haemophilus influenzae
gtgaacttgtgggaacagcatttttttatggtgttaggacttggcgttggtgccaatatttccttaaaaaaatcaggaatgtatgggaacggtggtttacttaccgcttgtggtttgggttatcaatggtgtccattactgttatttttgaaccactcaccagtgctcatgtaa

SEQ ID NO: 2142 - protein, 57 aa, Haemophilus influenzae
MNLWEQHFFMVLGLGVGANISLKKSGMYGNGGLLTACGLGYQWCPLLLFLNHSPVLM

SEQ ID NO: 2143 - DNA, 462 bp, Haemophilus influenzae
gtgttagtctatattattgctcaatgtatcggtgcgtttattgttgctctgattgtatggctattatttaaagatcatttagatgaagaagacaatcaaaattgtcaattaggttcttttgccactattgcaacaaactctaataacttacgcaatttactttctgaaattgtcaccacattttcattgttatttattttattcacactaaatcatcaacaacctactaatggtgttgcaatgttctttgtttttacgggagtagctggtggtgttatgtcctttggtggattaacgagttatgcaatcaacccagcacgtgattttatgctgcgtcttattcacgctatcatgccaattaaaaataaaggtacttccaatttcgattacgcttgggttcctgtcttgaggcctgtaattggtgcaatattagctgcttggttatacaaagcattgttttag

SEQ ID NO: 2144 - protein, 153 aa, Haemophilus influenzae
MLVYIIAQCIGAFIVALIVWLLFKDHLDEEDNQNCQLGSFATIATNSNNLRNLLSEIVTTFSLLFILFTLNHQQPTNGVAMFFVFTGVAGGVMSFGGLTSYAINPARDFMLRLIHAIMPIKNKGTSNFDYAWVPVLRPVIGAILAAWLYKALF

SEQ ID NO: 2145 - DNA, 309 bp, Haemophilus influenzae
atgcctgttattgtgaggaaaatcaagcctgacagctgggtttataccgatacttatcgaagctatgatgcccttgatgcgagcaaatttcaccacgaacgaatcaatcattccgaactatttgcggtgaaacaaaaccacataaatggaatagaaaatttctggagtcaggcgaagagaatcctccgaaaatataatggaatcgaccgaaaaaactttcctttattcttgaaggaatgtgaatttcggtttaactttggagtgccaaaagaacagcttaaaacattgcgaaaatggagtggtatttag

SEQ ID NO: 2146 - protein, 102 aa, Haemophilus influenzae
MPVIVRKIKPDSWVYTDTYRSYDALDASKFHHERINHSELFAVKQNHINGIENFWSQAKRILRKYNGIDRKNFPLFLKECEFRFNFGVPKEQLKTLRKWSGI

SEQ ID NO: 2147 - DNA, 375 bp, Haemophilus influenzae
atgtcctacccttatcaatttcgtttgaaaattatcaaactcgtcaccgaacaggattatggtatccgtgaggtggctaaacttcataaaatttcccacgctctcatcatttattggctaaaagcattttgggaaagagggcttgatggcgtaaaatcgcctcatacaaaccttcaaaccccgaaaatagtgaagccaaagatgaaaaagaaagatattgaaattccagaaaccacagacttttcacctaacgcgtttaaaaagttacaacgagagctcgccttggctcgagcggagattgcttacctaaaggagttggaggcgctcgaccgtcaaaaacaacgacagaaaaaagaaaaattattgaaagattga

SEQ ID NO: 2148 - protein, 124 aa, Haemophilus influenzae
MSYPYQFRLKIIKLVTEQDYGIREVAKLHKISHALIIYWLKAFWERGLDGVKSPHTNLQTPKIVKPKMKKKDIEIPETTDFSPNAFKKLQRELALARAEIAYLKELEALDRQKQRQKKEKLLKD

SEQ ID NO: 2149 - DNA, 366 bp, Haemophilus influenzae
ttgaagccagaccacgcattaaatgatttacttcgtgtggctaaaatgcctcgttcaagcttttactataaagagattaagcgaacttatcacgaggtaaaagagactatcttatcgttgtataaaaagaacagaaaacgagatggttatcgccctatgacgtttaaattacgccaaatggggtttaatttgaatcataaaacggtgttaaagctgatgaatgagttaggtattcattccattttacgcaagaaaagacatggaaaacgtggaaaaacatcgcatattgccccgaatttgctgaatcgtgattttacagtgacggcactcaatcaaaaatgggtaacggatgtaacggaattttag

SEQ ID NO: 2150 - protein, 121 aa, Haemophilus influenzae
MKPDHALNDLLRVAKMPRSSFYYKEIKRTYHEVKETILSLYKKNRKRDGYRPMTFKLRQMGFNLNHKTVLKLMNELGIHSILRKKRHGKRGKTSHIAPNLLNRDFTVTALNQKWVTDVTEF

SEQ ID NO: 2151 - DNA, 240 bp, Haemophilus influenzae
atgttggagggtaaagcggtgcaaagtatgagtcgacgaggaaattgttacgataatgcggtgattgaaagcttttttgcaatattaaaatcagagtgtttttactctcggacttatcattcaattgctgaattacaagctgaaattgaagaatatttagtgtattacaaccaaaaacgaattaaacttggtttaaaaggattgagcccagtgcaataccgagctcaatatttaagttaa

SEQ ID NO: 2152 - protein, 79 aa, Haemophilus influenzae
MLEGKAVQSMSRRGNCYDNAVIESFFAILKSECFYSRTYHSIAELQAEIEEYLVYYNQKRIKLGLKGLSPVQYRAQYLS

SEQ ID NO: 2153 - DNA, 1227 bp, Haemophilus influenzae
atgaaacattatttagatgaattagcccaaactgcccagcggatcttgcttttgcaggggcctatcggccatttttttaccgatctttctgcttggttagtgggacaaggaaaaaccgtttataaaatcaattttaacggtggcgatgaacatttttatccgtcatcgattgaaaacacgactgcttatcgtggctcagtgagtgagttctacccttacctgcaactattttgcaaacaacacaatattgatgcgatggtttgctttggtgacaaccgtagataccacaaaatcgcaaaaaaaatatcacaagatgaacagattccattttgggtgtttgaagaaggctatttccgtcctgattacgtgacactcgaaaaacaaggggtcaatgcgttctcccctcttcctcgccaagcagatttctatcttgagcaagccgaaaatttacctgagccagctataccacttaaattagccaaaggttttttaccgatggcaaaagtggcaatcgcttattacactaaagcttactttgggcgagataattacccgaaataccaacaccaccgcattctgaatctgaaatactatataaaactatgggttacatcaggcatcaagcgtgcttgttattacttgcgtgatcgtacctttgcaagaaaagtcaaccgtgggaaattaggtgatttctttgttgtgccattgcaagtttatgatgacagccaagtgaaagtacattgtgatttcaacagtgtcggcgcattcttgcgtgaagtattgcaatcttttgctgaatcagcaccaaacaatctcaatctagtcattaagcatcacccaatggatcggggttttattcattatgatcctgttattcaagaatttgaaaaccgttatccgcacttaaaagggcgactattctatgtgcatgatgtgccattgcccgttctgcttcgtcgcggtaaaggcatggtaacgctgaatagcacgagtggtatttctgccttattacatggtatgcctgtcatcacacttggacgagccaattatcattttgaagggcttacacaccaaggtgacttatcctcattttggcaaaaccctactaagcccgatccattcgtttttgaggcttaccgcaaatatcatctgaataaaaccatgattaatggtagtttttataatcgagtgattattgatctgccccctaaaagttggacaggttag

SEQ ID NO: 2154 - protein, 408 aa, Haemophilus influenzae
MKHYLDELAQTAQRILLLQGPIGHFFTDLSAWLVGQGKTVYKINFNGGDEHFYPSSIENTTAYRGSVSEFYPYLQLFCKQHNIDAMVCFGDNRRYHKIAKKISQDEQIPFWVFEEGYFRPDYVTLEKQGVNAFSPLPRQADFYLEQAENLPEPAIPLKLAKGFLPMAKVAIAYYTKAYFGRDNYPKYQHHRILNLKYYIKLWVTSGIKRACYYLRDRTFARKVNRGKLGDFFVVPLQVYDDSQVKVHCDFNSVGAFLREVLQSFAESAPNNLNLVIKHHPMDRGFIHYDPVIQEFENRYPHLKGRLFYVHDVPLPVLLRRGKGMVTLNSTSGISALLHGMPVITLGRANYHFEGLTHQGDLSSFWQNPTKPDPFVFEAYRKYHLNKTMINGSFYNRVIIDLPPKSWTG

SEQ ID NO: 2155 - DNA, 2043 bp, Haemophilus influenzae
atgccaactgcactgattttctcgcacggaatcaaaaaaattccgcatttagcctcattttttcctaatgaagaattggttttcgcacgcattttttctgtgtcgaaggctgattctgtattgggttggggggtacgtccttccacgaaaaaatcacgtgcatatgcacaaaagtataacttaccgtttatcgccttagaagacggttttttacgttctcttggtctgggagttgatggttatccaccactttctatggttgtggataaattaggtatttattacgacacgactcgtccctcaacattggaacagcttgttctagcgggagaatgtgatgaggttttagcggaaaaggctcggtcacaaattgtggcgcatcaactttcaaaatataaccaaacattggtggattatgagaaagaaggtgacgagccgttagtgcttgtcatcgatcaaacctttggcgatatggcggtgaaatatggtcaagccgatgctgagcattttgcacaaatgttacaagctgccattacagaaaatcccaatgccaaaattttagtgaaaacccatcctgatgtattaagtggtaaaaaacagggttatttttcgccaaatgaaaattatccaagcaacgtgcatttttttagtgatcccgtcaatccgatttcgctgattaaagccgtagagaaagtttattgtgttacctctcaaatggggtttgaagcattattagtgggtaaaccggtggtgacttttggcgtaccatggtttgctggctggggtgtgacggatgatcgtcatcagaatgctaaagcgctaacgcaaagtgagcgccgtaaagtgcggtcagttttacaactgttttatgcggcatattttcaatatactcgctatttgaatccgaataccggccaatcgggaacgatttttgatgtcattaaccatatcattcacaccaaagcacttaacttacgattacaaggcaatctctattgcgttggaatgtcgttgtggaaacgtgcggttattaaaccgtttttccgtttaccaagctgcaagctatattttgttaaagatgtgagcaaactcaatggtaaaatattcacaaaaaatgaccgcttgttactatggggaacgggtaaagaagctgtgctaaattatgctaaagcgcataatattaacgtactcataatggaagatgggtttattcgttcagttgggcttggctcaaacttggttgcacccctttctttagtctgtgacgatttaggtatttatttcaatgcagaaagcccttctcgcttagaagagattttgcagcatcaacaatttaccgaagcggatttaatcgaagccaagcagctacaacatgcgttagtatcgcaacatatcggtaaatataatgtcggtgaaggtacattttctttaccaaatacagacaaaaagaaaattttagtggtgggacaggtcgaagacgatgcgtctattcgaactggctccccgaatattcgcactaatttagatttattaaaaacggtacgcgcaacaaacccagaagcttatatcgtttataagccacacccggatgttgtaagtggtaaccgcattggtcatattgcagaatcgcaagcggtcaaattagcggatcaaattgcaaaaacagaaaacgtgcttgactgcatcaatgccgtggatgaactacacaccatgacatctcttgccggctttgaagccttgctaagaaacaaaactgtgcattgctatggtgtgccgttttatagccactggggattaaccgttgatcactgctcttttaatcgtcgcagtagaaaactttcattgttagaacttattgctggcacattggtctattatccacaatatgttaatccgaatacgggtgagctaagcaatgctcaaacagcgattgaaattttaaaagcacagcgtttagcgcttaatcacagtgacattcatcgccattggctagctaaacaatatggcaaattgcagcatttagtgcgcgcattgcgtacttaa

SEQ ID NO: 2156 - protein, 680 aa, Haemophilus influenzae
MPTALIFSHGIKKIPHLASFFPNEELVFARIFSVSKADSVLGWGVRPSTKKSRAYAQKYNLPFIALEDGFLRSLGLGVDGYPPLSMVVDKLGIYYDTTRPSTLEQLVLAGECDEVLAEKARSQIVAHQLSKYNQTLVDYEKEGDEPLVLVIDQTFGDMAVKYGQADAEHFAQMLQAAITENPNAKILVKTHPDVLSGKKQGYFSPNENYPSNVHFFSDPVNPISLIKAVEKVYCVTSQMGFEALLVGKPVVTFGVPWFAGWGVTDDRHQNAKALTQSERRKVRSVLQLFYAAYFQYTRYLNPNTGQSGTIFDVINHIIHTKALNLRLQGNLYCVGMSLWKRAVIKPFFRLPSCKLYFVKDVSKLNGKIFTKNDRLLLWGTGKEAVLNYAKAHNINVLIMEDGFIRSVGLGSNLVAPLSLVCDDLGIYFNAESPSRLEEILQHQQFTEADLIEAKQLQHALVSQHIGKYNVGEGTFSLPNTDKKKILVVGQVEDDASIRTGSPNIRTNLDLLKTVRATNPEAYIVYKPHPDVVSGNRIGHIAESQAVKLADQIAKTENVLDCINAVDELHTMTSLAGFEALLRNKTVHCYGVPFYSHWGLTVDHCSFNRRSRKLSLLELIAGTLVYYPQYVNPNTGELSNAQTAIEILKAQRLALNHSDIHRHWLAKQYGKLQHLVRALRT

SEQ ID NO: 2157 - DNA, 1824 bp, Haemophilus influenzae
atgaatattaaaaatatagcaattaacttttcatctaaaaaagattttctaaataattttggtaaaattaataatgaaaaaacgagcttatccataataaataaaaacgagattattataaaaggtaaaaaaaatgataattctcttaactttactttattaaaaaataaaaaatatttaaaacctgggaagacttatactatttcctgtgattttattcttaataaaaaaatatctaaaacattaccttttgatgttcctaaaattgcttttgattgtacaattaatggaaaagataactttgactatcaatctagctcatctattcctaatgaagtgggagtttggcataaatctttgaccgtcaaagttcctaaaaattgttctaatgcatggtttagaatttatgtgggaatagaaaaagatgctggcgaattattaataaaaaatatttttatatcagagaataactttgatttcatttacttaaataatctattctatcacaatgaagataatgatactttttctttattatctgatttcaaagaaaactatattgaaaaatgtaatgatgtatcttatctctttagaaatggacactacacattcgtgaactcaatcattaaaaatattaatgatagtgcaataagaaaaaaatttaagttatatttagttatgtcaaaagaaaatgtatcgggtacattagcttactttaacaatattaaaaatgaacttaacgagcaagattctgttttagcttctgacgcaatacatttttttgctagaaatttaaaatgggacacaattaaagatatagtaaattttttcgataaaaaaggattgtaccacaactgcatagaatatttatatgagaaggctcagctttatagaagattaaaagataaagaaaatgaattaaaatactataatcttgcattatccatagatgaaaataaaaatccaaatataaattggaatctattttttgatagtaataatccaggtctaagctatagaagagatgaattaaagtttattctagaaaacttatcagacatacagagaattgccgattcctatccttcttctcatatcaactttaaagaatcgccagtttttgtcttttgggatcaaggatatgataacgcgccgctcatagtaaaatctatgatagacagaatgaaaataatatatggtaataaactggtatttcttactggagaaactatagaggcttatatagatataccggctagaatagaaagtttcagagaatctaaaagagcctttttctcagattatattcgtacagaattattattgagatatggtggtacttggatagattcaactgtattcacaacgaatcaattttataaagagaatttagaaatattagaaaaaaatgataataatctatatgtactaagaattcctgaaaatccataccgaatttctaattggtttttatcaacaaaccaaactggaaatagaatactggctttaatgtatgcaactatgttgatttttgctgaaaaaagaaacagtctatttgaatattatcaataccataccttttttgaaatcttaacacagttagataaacaagctaatgaagactttcataaaaattatagaaataactatcaaccttatgcacatgatgtgttaaaaaactttagaaatgattgggatagagagttatttaataaactaattgcttgctgtccaatacaaaaactgacatataaatctaatttattacacttaagaacacattctttttacaaaactattattagaaatgcagcttttttataa

SEQ ID NO: 2158 - protein, 607 aa, Haemophilus influenzae
MNIKNIAINFSSKKDFLNNFGKINNEKTSLSIINKNEIIIKGKKNDNSLNFTLLKNKKYLKPGKTYTISCDFILNKKISKTLPFDVPKIAFDCTINGKDNFDYQSSSSIPNEVGVWHKSLTVKVPKNCSNAWFRIYVGIEKDAGELLIKNIFISENNFDFIYLNNLFYHNEDNDTFSLLSDFKENYIEKCNDVSYLFRNGHYTFVNSIIKNINDSAIRKKFKLYLVMSKENVSGTLAYFNNIKNELNEQDSVLASDAIHFFARNLKWDTIKDIVNFFDKKGLYHNCIEYLYEKAQLYRRLKDKENELKYYNLALSIDENKNPNINWNLFFDSNNPGLSYRRDELKFILENLSDIQRIADSYPSSHINFKESPVFVFWDQGYDNAPLIVKSMIDRMKIIYGNKLVFLTGETIEAYIDIPARIESFRESKRAFFSDYIRTELLLRYGGTWIDSTVFTTNQFYKENLEILEKNDNNLYVLRIPENPYRISNWFLSTNQTGNRILALMYATMLIFAEKRNSLFEYYQYHTFFEILTQLDKQANEDFHKNYRNNYQPYAHDVLKNFRNDWDRELFNKLIACCPIQKLTYKSNLLHLRTHSFYKTIIRNAAFL

SEQ ID NO: 2159 - DNA, 3585 bp, Haemophilus influenzae
atgcttgtaaattgtaaagaaacccacgaatgctggtgggttgcagacaacgaagaaagcatgaagagtataaaaaaatctactggcttaaaaaacattacgtttaccgatagtgaaaaagctaaagaacttttccctcatgccgacgtttacgtaacagaaaacttccgtgaaagttatccagtttacatgaatgaaaatatcaaagttttcaacacatggcatggcgttggtttaaaacatattgaattagcattaggcatgaattcagtattagctgaaagcattgttcgaaaatatgttcgaaactatgatatctacaaaaataatgtattgtttcttacaacatcgcaagcaatggaagatcacttccttgaagatatggcgatcagtaaagaactaattatccgcgggaaataccctcgcaatgcagtttatggtcctaatgggatccatacctatgatatcaatacgcttttaccaaaaaataaaagccaatatagccaaactattcttttctgcccaacttatcgtattggtgcaatccaaggtgttttaaatagcctattaccagattttgctaaacttgaagaagtttgccgtcataaaaatcaactattcatcgttaaagttcacccgttcatgaagaaagataattacttcgctgaaatgagtgaaaaatataaagatagtgaatacatcctattttggaatgatgactatgatatttatgaggcattcaattctatcgatctcgcgattattgactattcaagtatcttttatgatttattagatgctggcgttgaaaaattcattcgttatgtacctgacttagatgaataccagaatgatcttgagctaattggcgattatgccgatttaacagaaggtcgcatcgttaaatcattccaacaattattaaattgtttagataatgccaacattaaaatcatttcaacaaaaagaaaacaatatcttatggattatttctttggatttaagaaagaaaataaatcaatggaatctttaattgcagatgttgataattgccaattacaaccaaaatcgttaaaagaactccatacatttgatatttttgataccttaattcgccgctcgacattacgtccatttagtatttttgactatgtacgcgataaagctaaagcatcaggtatcaaattcccgcttgcattgactgaaaattggatcaatgtacgtaaccgtgctgaacacgatgtgcgagatatcatgcgtaaaacaacgtttgagcgtcaatcagataaaattgagattacattagacgatatctacactcgcttgcaaaaaaatctattacttaccgatgaacaaactgatttcttaaaacaagctgaaattgaagctgaaattgctcatgttgagccaattcaaaaacgaattaactatctcttctcgttaaaagcgaaaggacatgatgtagccatggctagcgatatgtacttgcctgaagacgtaatttataaaatgttagatcgtgcggatactcgtttacgtgaaattccactttatctttcaagtacgattggctaccaaaaatcaactgggaaattataccaacacatctttttcgacttagattaccaatatagccgttggacacactatggcgataacaaacacgctgatggttctgttcctcgccgtcttggtattcaaactgcagtgcatgatattgatgattttatcccatttgaaaatgcaatggttaatgcaatggataactataaccgctatccagcttaccagcttgcaactaagatgcatcgttaccgcacacagcttgttcaagaaaatggtttcggtaataccctatttgaaaccaaatattacaactatgcttatgtaggcgcctcttttgttccttatatcaactgggcaattaaagatgcaattaaacgcggctatgaaaccatttactttatctctcgcgatgggcatttcttaaagcaaattgctgacaaaattattgaaattcgtggctataacgtaaaaacaaaatatatctacggttcacgtaaagcatggcgtttaccttctttcattaccaaagttgatgatgaaaccttctggcaatttggtaactttgtcggtatggatagctttgaagatttggtgaaagccagttatttaagcgaaagtgaactcttatctctcttccctgaatttgaaagtttacgtcatgccaaacaccttcgtggtgaaatagctgaaaacattcgtaaaattttcaaaaattcacccgcttaccatgagaaagtgttagcgatcgccgctgaaaaacgcaaaatggtacgccaatacattcaacaagaaattaatccaaaagaaaaatttgcgtttgttgaattctgggggcgaggctatacacaagatacctttggtcgtctgctaaatgatgcctttggtaaagaagtaaaaaacccattctattatgtcagaagttttactgatgatatgggtacatctgttcgccataacttcatcttagcaccacaaaacttctcattcttcgagcctatttttgcacaaaccccatacgacagtattcctgattactacgaagaaaaaggcagaattgaaccaattattaatcaccgagatagaagcgtaagcgatctcatttcggaagggttattaaaatttacagaagattacttagcactcaatacgcaagacgaagattactttgatgcagcattatcgcaatttaactatcaatatcagttaaatacaccaaatgatcaatttatttgcaatgtattcagtgaattaaaagataacatttcaagttttggtgtagaaaaaccttatgcaccagcattaacgctgaaacagcttgaaagtatcacctctaaacaagagctggataaactgactcaatcaattcctatctcactctcaaaaagtgatgtaaaagtaattgattattataataaaattcagaaaaactataatttaccggcatataacagcacaccaatgcgtaaagcttatgcagtaaacccattagaacaatatgtttggagcacacaggttccatttagagtactttcattaaaacaaaacagcttctatttagatgtgagttttgctgaaacgaccaaacgaaaagatattttcttaaaagaattaaatgaaatcgatgttattgccgttgattggttaaaaggcggggttccgcgtttattaacagagcacggatatattacggctcataaagactgggtaaaaaaatcatttaatgatgataaaaccaataatattgaagaacctaaggtaaaaaataaagagaaaagtaaggtactagaagtaaatactactgtaaccaataacaataaacaagctattggtaagttagataataatattgataagtcaaataaagagcagaagaaacgtaagctagctagaaatccttatgcttttttcaatgattctaaaaaacctatattaaatagtcttaagcatttatttaatgagagccattccttaggcagacttctaagtaggattgttagaaaaacacttaaccatgattaa

SEQ ID NO: 2160 - protein, 1194 aa, Haemophilus influenzae
MLVNCKETHECWWVADNEESMKSIKKSTGLKNITFTDSEKAKELFPHADVYVTENFRESYPVYMNENIKVFNTWHGVGLKHIELALGMNSVLAESIVRKYVRNYDIYKNNVLFLTTSQAMEDHFLEDMAISKELIIRGKYPRNAVYGPNGIHTYDINTLLPKNKSQYSQTILFCPTYRIGAIQGVLNSLLPDFAKLEEVCRHKNQLFIVKVHPFMKKDNYFAEMSEKYKDSEYILFWNDDYDIYEAFNSIDLAIIDYSSIFYDLLDAGVEKFIRYVPDLDEYQNDLELIGDYADLTEGRIVKSFQQLLNCLDNANIKIISTKRKQYLMDYFFGFKKENKSMESLIADVDNCQLQPKSLKELHTFDIFDTLIRRSTLRPFSIFDYVRDKAKASGIKFPLALTENWINVRNRAEHDVRDIMRKTTFERQSDKIEITLDDIYTRLQKNLLLTDEQTDFLKQAEIEAEIAHVEPIQKRINYLFSLKAKGHDVAMASDMYLPEDVIYKMLDRADTRLREIPLYLSSTIGYQKSTGKLYQHIFFDLDYQYSRWTHYGDNKHADGSVPRRLGIQTAVHDIDDFIPFENAMVNAMDNYNRYPAYQLATKMHRYRTQLVQENGFGNTLFETKYYNYAYVGASFVPYINWAIKDAIKRGYETIYFISRDGHFLKQIADKIIEIRGYNVKTKYIYGSRKAWRLPSFITKVDDETFWQFGNFVGMDSFEDLVKASYLSESELLSLFPEFESLRHAKHLRGEIAENIRKIFKNSPAYHEKVLAIAAEKRKMVRQYIQQEINPKEKFAFVEFWGRGYTQDTFGRLLNDAFGKEVKNPFYYVRSFTDDMGTSVRHNFILAPQNFSFFEPIFAQTPYDSIPDYYEEKGRIEPIINHRDRSVSDLISEGLLKFTEDYLALNTQDEDYFDAALSQFNYQYQLNTPNDQFICNVFSELKDNISSFGVEKPYAPALTLKQLESITSKQELDKLTQSIPISLSKSDVKVIDYYNKIQKNYNLPAYNSTPMRKAYAVNPLEQYVWSTQVPFRVLSLKQNSFYLDVSFAETTKRKDIFLKELNEIDVIAVDWLKGGVPRLLTEHGYITAHKDWVKKSFNDDKTNNIEEPKVKNKEKSKVLEVNTTVTNNNKQAIGKLDNNIDKSNKEQKKRKLARNPYAFFNDSKKPILNSLKHLFNESHSLGRLLSRIVRKTLNHD

SEQ ID NO: 2161 - DNA, 1116 bp, Haemophilus influenzae
atggctatccccccctattttatttatttggacaccaagattattggtgcggtaaagcaaacaattactttttttgaacatggcgtgtttcctcgtgaaaacacgatcattttagtaaaaaagtataaacataagtccgctaaaatcattgagcgagctttaaataaagcttctctcaactatcattttgtgaatgctgcatatcttgatgcattgaaagaaggtgtaattttctacccatttaatgcacaatctaattgtcgtgcagtagcaaaccgtaaccttactcatatttttattactcatggggaaagtaataaaattacttcagttaaaccgattgtacgtatttatgatcatgttattaccgcaggtaatgccggcatagatcgcttgattgctcataaaatcttctctcaatatgatgttgaggctggaagaattattcctatgggcgatacttttatcggaaaaaccggtctagaccacacaggtaaaggcattcccgccatcttctatgtgccaacatgggaaggtggcatagaacaagaaaactattcaagcttgtcttatgtagggcaagtaacaaacaccttgctcctattaagtaaacactatcaaatcaatgaaatcgttattcgaccacatccgaatacaggacatcgtctgcaaaattatcatcaatttttaatggatattgtaaaaacacttttacataaaggattaaaggtgacattatataaacctcatgtagggcttacattctcacaagcttggaaactacgacgaaatgggggtacattaacttccgatttaagcaaattttatgcaattattgggctttgtgatatttcagctatagaaagtcaattattaaatgaaaatattttctattatttattttgttcaaaagcacaaaaagaatatttaattagtttaaaaaacagccaatactataaaacaaatactctcacttttggtgagaagctttattttcaccatatatcaaaagacgatttttatcaacttcgcaattatatgatagaacaaaattatttgaatattccacttaatcaacgaattgaacaacttctagcaaaattaaatcaattataa

SEQ ID NO: 2162 - protein, 371 aa, Haemophilus influenzae
MAIPPYFIYLDTKIIGAVKQTITFFEHGVFPRENTIILVKKYKHKSAKIIERALNKASLNYHFVNAAYLDALKEGVIFYPFNAQSNCRAVANRNLTHIFITHGESNKITSVKPIVRIYDHVITAGNAGIDRLIAHKIFSQYDVEAGRIIPMGDTFIGKTGLDHTGKGIPAIFYVPTWEGGIEQENYSSLSYVGQVTNTLLLLSKHYQINEIVIRPHPNTGHRLQNYHQFLMDIVKTLLHKGLKVTLYKPHVGLTFSQAWKLRRNGGTLTSDLSKFYAIIGLCDISAIESQLLNENIFYYLFCSKAQKEYLISLKNSQYYKTNTLTFGEKLYFHHISKDDFYQLRNYMIEQNYLNIPLNQRIEQLLAKLNQL

SEQ ID NO: 2163 - DNA, 834 bp, Haemophilus influenzae
gtgttaaaaaccctacctgaagaaagagttggtatcgtttcaggttctgaaaccaacattaaattaactcgcccagttgatctttttatcgctgataaattattccaaagccgtagtcatttttcactacgtaatatcacctctattgatcgcctatatgatatgaaagatcaggtattagttgttattggtggaagctatggtattggcgcgcatattatcgatattgcaaaaaaatttggaattaaaacatatagccttagtcgttcaaatggtgtcgatgttggtgatgttaagtctattgaaaaagcattcgcagaaatttacgcaaaagaacacaaaatagaccatatcgtaaatactgctgcggtgttaaatcataaaacgttagtatcaatgtcttatgaagaaattttaactagtatcaatgtaaactacacgggcatgattaatgctgtgataacggcttatccttacttaaaacaaactcatggtagttttttaggtttcacatcaagctcgtatacacgaggccgtccattctatgctatttactcttctgcaaaagcagctgtggtaaacttaactcaagccatctctgaagaatggttaccggataatattaaaattaactgcgttaatccagagagaacaaaaacaccaatgagaaccaaggcattcggtattgaacctgaaggtacattacttgatgctaaaacagtagcttttgcctctcttgtcgtacttgctagccgcgagacgggtaacatcattgatgttgtattaaaagatgaagaatatattaccaatattttagctgatctctataaataa

SEQ ID NO: 2164 - protein, 277 aa, Haemophilus influenzae
MLKTLPEERVGIVSGSETNIKLTRPVDLFIADKLFQSRSHFSLRNITSIDRLYDMKDQVLVVIGGSYGIGAHIIDIAKKFGIKTYSLSRSNGVDVGDVKSIEKAFAEIYAKEHKIDHIVNTAAVLNHKTLVSMSYEEILTSINVNYTGMINAVITAYPYLKQTHGSFLGFTSSSYTRGRPFYAIYSSAKAAVVNLTQAISEEWLPDNIKINCVNPERTKTPMRTKAFGIEPEGTLLDAKTVAFASLVVLASRETGNIIDVVLKDEEYITNILADLYK

SEQ ID NO: 2165 - DNA, 597 bp, Haemophilus influenzae
atgaataaaaataaaaacataggaatcattctagctggtggtgttggctctcgtatgggattgggctacccaaaacaattctcaaaaattgcaggcaaaactgcgctggagcatactcttgccattttccaagaacataaagaaattgatgaaattatcatcgtttctgagcgtacctcttatcgtcgtattgaagatatcgtatcaaaagctggattttccaaagttaatcgtattatttttggtggtaaagaacgctctgattctactctttctgcaatcacagctcttcaagatgaaccagaaaatacgaaattaatcattcatgatgctgtacgacctttactagcgactgagataatctctgaatgtattgcgaaattagataagtacaatgctgtagatgtggctattcctgcagttgataccattgttcatgttaataatgatacccaagaaattattaaaattcctaagcgtgctgaatactaccaaggccaaactccacaagcatttaaactaggcacgctaaaaaagcttacgatatttatacacaaggtggcatcgaaggtacttgtgattgttctattgtgttaa

SEQ ID NO: 2166 - protein, 198 aa, Haemophilus influenzae
MNKNKNIGIILAGGVGSRMGLGYPKQFSKIAGKTALEHTLAIFQEHKEIDEIIIVSERTSYRRIEDIVSKAGFSKVNRIIFGGKERSDSTLSAITALQDEPENTKLIIHDAVRPLLATEIISECIAKLDKYNAVDVAIPAVDTIVHVNNDTQEIIKIPKRAEYYQGQTPQAFKLGTLKKLTIFIHKVASKVLVIVLLC

SEQ ID NO: 2167 - DNA, 1185 bp, Haemophilus influenzae
atgagaaattatccattaaaagcggtctgtgcggtgttaatgttggggctgtcagcttgttcttcgttacccacttcagggccaagccattcggctgtattagagataaaccaaggtgctgatgcttctgaattagcagcaaaagttaatgtaattgaattaaatgagtcgttagtgcagcaaatatatgcagctcaacaaagccagcgtttttcaggttttgcagatgtacgtggcaatggtggttatgccggtgctgtaaatgtgggggatgtattagagatttccatttgggaagcgcctcctgcagtattatttggtacaacctttagtagtgaaggacagggcagtggtcatgttacgcaattaccttcacaaatcgtgaataaaaatggtacggtgactgtaccatttgtaggaaatatcagtgttgcaggtaagacaccagaggctattcaagctcaaattgtagcaagccttagccgtaaagcgaatcagccacaagccgtagttaaaattgctaacaataattcatcagatgtcactgttattcgtcaaggtagtgctgtgcgtatgccattaactgcaaatgatgaacgtgttttagatgcggtggcagctataggtggttcaacaggaaatattgaagacgtgacagttcagcttactcgaggaaatcaagtgaaaacattggcatttgaaaccttaattgccgatcctaagcaaaatattgtattacgtgcaggggatgtggtttcacttttaaatacgccatataaattcacagggctaggtgctgtaggtaataaccaacagttacgtttttctagcagtggtattacgcttgctgaagcgattggtaaaatgggtggtttgattgatacgcgttctgacccacgaggtgtctttgtattccgttatatgccgtttgcacaactagactctaaagcacagcaagaatgggcggctaaggggtatggtaatggcatggaagtgccaacagtatatcatgcgaatttattacaaccggaaaccatgtttttattacaacgtttccctatccaagataaagatattgtatatgtgtcgaatgcacctctttcagaattccaaaaattcttgagaataattttctcgattacctcgccggtaacgagtacgaccaatacgatcagaagttattaa

SEQ ID NO: 2168 - protein, 394 aa, Haemophilus influenzae
MRNYPLKAVCAVLMLGLSACSSLPTSGPSHSAVLEINQGADASELAAKVNVIELNESLVQQIYAAQQSQRFSGFADVRGNGGYAGAVNVGDVLEISIWEAPPAVLFGTTFSSEGQGSGHVTQLPSQIVNKNGTVTVPFVGNISVAGKTPEAIQAQIVASLSRKANQPQAVVKIANNNSSDVTVIRQGSAVRMPLTANDERVLDAVAAIGGSTGNIEDVTVQLTRGNQVKTLAFETLIADPKQNIVLRAGDVVSLLNTPYKFTGLGAVGNNQQLRFSSSGITLAEAIGKMGGLIDTRSDPRGVFVFRYMPFAQLDSKAQQEWAAKGYGNGMEVPTVYHANLLQPETMFLLQRFPIQDKDIVYVSNAPLSEFQKFLRIIFSITSPVTSTTNTIRSY

SEQ ID NO: 2169 - DNA, 1134 bp, Haemophilus influenzae
atgacaaccgaaaatccggcaataccgacgaaaaagaagaaatcattctggaagaaaatgaaaccgctttttggattaactgtattgattccaacagccttttctgcggtatactttggactgtttgcgtctgatatttatgtttcagaatctagttttgtagtacgttctcctcgtagtcagtcttctttaagcggagttggtgcattgttgcaaagtacgggtttttctcgttcacaggatgatacttactctgtgcaagagtatatgcgttcacgtacagcactatccgcattagagcaaggtttgcctcttcgcactttttattctgaaaaaggcgatttattaagccgctttaatgggtttggtttgaatgatacacaagaggcattctatcgttattttaaagagcgtttgagtgttgatgtggattctatttctggcattgcaacattgcgagtgcatgcttttgatgctgaagaaggttatcaaatcaatgagcgcttattgaaagaaggtgaatcattaatcaatagattaaatgagcgtgcaagaaaagatacgattgaatttgctgaacaggccgtaaaagatgcagagaaaaatgtgaatgaaactgcacaagcattgagtcaatatcgtattaaaaacaaaatttttgatttgccagcacaatctggagtacaactttcgttaatttcaagtttgaaaagtgaattgattcgtgttgaaacgcaattagcacaattagtttcgattacaccagataacccacaggtgccagcgttgcaaatgcgccaaaaaagcttgaaaaaagagattgatgaacaaacacgtcaattatcaggtaacggcaactcagcagcgacacaaactgcggattatcaacgtttaatgttagcgaatgagttagcgcaacaacaacttgcagctgcaatgacttctttgcaaaatacgcgaggagaagctgatcgccaacaactttatttggaagtcattagccaaccaagcaagccagactgggcattagagccaagtcgtatctataatattattgcaacctttattattggcttaatgttatatggtgtattgaacttactcatcgcgagcataagagagcataaaaactaa

SEQ ID NO: 2170 - protein, 377 aa, Haemophilus influenzae
MTTENPAIPTKKKKSFWKKMKPLFGLTVLIPTAFSAVYFGLFASDIYVSESSFVVRSPRSQSSLSGVGALLQSTGFSRSQDDTYSVQEYMRSRTALSALEQGLPLRTFYSEKGDLLSRFNGFGLNDTQEAFYRYFKERLSVDVDSISGIATLRVHAFDAEEGYQINERLLKEGESLINRLNERARKDTIEFAEQAVKDAEKNVNETAQALSQYRIKNKIFDLPAQSGVQLSLISSLKSELIRVETQLAQLVSITPDNPQVPALQMRQKSLKKEIDEQTRQLSGNGNSAATQTADYQRLMLANELAQQQLAAAMTSLQNTRGEADRQQLYLEVISQPSKPDWALEPSRIYNIIATFIIGLMLYGVLNLLIASIREHKN

SEQ ID NO: 2171 - DNA, 798 bp, Haemophilus influenzae
atgcaatatggtgataaaacaacatttaaacagtcattagctattcaaggacgggtgattaacgcgttgcttatgcgtgaaataatcactcgttatgggcgtcaaaatattggctttttttggctatttgttgagcctttgctcatgactttttttattgtaatgatgtggaaatttatccgtgctgataaattttctactttaaatatgattgcctttgtgatgacggggtatccaatggcaatgatgtggcgaaatgcttcaaaccgtgcgattggttccatttctgcaaacttgagtttactttatcaccgaaatgttcgagtgctagataccatttttactcgcgtgttgcttgaggttgctggtgcttctattgctcaaattctttttatggcaatcttagtcatgattgattggattgatgcaccgcatgatgtgttttatatgctcattgcatggttcctcatggcaatgtttgcttttggcttggggttaatcatttgtgcgattgctcagcaatttgatgtgtttggtaaaatttggggaacactcagtttcgttttattaccaatttctggcgcattcttcttcgtccataaccttccagcacaggcacaatctattgcactttggtttccgatgattcatggtacagaaatgttccgccatggctattttggcgatacagtggttacttacgaaagtataggctttttggttgtgagtgatctagccttgttgttactgggcttagtgatggttaaaaactttagtaaaggagttgagccacaatga

SEQ ID NO: 2172 - protein, 265 aa, Haemophilus influenzae
MQYGDKTTFKQSLAIQGRVINALLMREIITRYGRQNIGFFWLFVEPLLMTFFIVMMWKFIRADKFSTLNMIAFVMTGYPMAMMWRNASNRAIGSISANLSLLYHRNVRVLDTIFTRVLLEVAGASIAQILFMAILVMIDWIDAPHDVFYMLIAWFLMAMFAFGLGLIICAIAQQFDVFGKIWGTLSFVLLPISGAFFFVHNLPAQAQSIALWFPMIHGTEMFRHGYFGDTVVTYESIGFLVVSDLALLLLGLVMVKNFSKGVEPQ

SEQ ID NO: 2173 - DNA, 117 bp, Haemophilus influenzae
atgattcgcgtaaataatgtatgtaagaagtatcacacaaatagcggttggaaaaccgtgttaaaaaatatcaattttgagctacaaaaaggcgaaaaaatcgggatttcaatttga

SEQ ID NO: 2174 - protein, 38 aa, Haemophilus influenzae
MIRVNNVCKKYHTNSGWKTVLKNINFELQKGEKIGISI

SEQ ID NO: 2175 - DNA, 999 bp, Haemophilus influenzae
atgaaacttcttaaattaaccttaatttctaccgcacttttttccactgcggcactagctcaagcacagcaaagtgtaaacgtgtatagctacgactctttcacttctgaatggggggctgggccaaaagtaaaacaagattttgaaaaagcccatccacaatgtgcgattaattttacgccttttgaaagcgttggtgtgttgctcaaccgtgttcgtttggaaggaaagaaaacaaaagcggatattgtgctaggtttagataacttttttttggaacaagctgaaaaaacaggtatttttgcgccaaataacgtggatttaactcagctggatttaccaacaaaatgggcgaataaaaccttcttaccttttgatttcggtaattatgcttttgtgtacgataaaactaaattacaaaacccgccgaaaagtttgaaagaattagttgaacgtcaagatcttagtgtgatttatcaagatcctcgcaccagcagtgtgggtcgtggtttattggtttggatgaatgccgtttaccctgctgataaaattcaatccgcttggaaaaatttagataagcatacagtgacagtgggtaaaggctggtcagatacttacggtgcatttttgaaaggcgaagcggatttagtattaagttacagcacatcgccactttatcatcaactttttgagaaaaaagataattatgcggcgacagattttgcggaagggcatattactcaagtagaattagcggcaagagttgccaaccatcccaatcaatgtgcggatgattttatggcatttttaatttcgcctacagcacaaaaacatattgtgacagccaatattatgttgccagttattcaaggcgaaattgaaccgcactttgatgcgcttaaagttcaacaaaaaatgcaaacaccaattaatccaacagtgaatcctgagcagttaaaaaattggatcagcacttggcaaactacattaacaaaataa

SEQ ID NO: 2176 - protein, 332 aa, Haemophilus influenzae
MKLLKLTLISTALFSTAALAQAQQSVNVYSYDSFTSEWGAGPKVKQDFEKAHPQCAINFTPFESVGVLLNRVRLEGKKTKADIVLGLDNFFLEQAEKTGIFAPNNVDLTQLDLPTKWANKTFLPFDFGNYAFVYDKTKLQNPPKSLKELVERQDLSVIYQDPRTSSVGRGLLVWMNAVYPADKIQSAWKNLDKHTVTVGKGWSDTYGAFLKGEADLVLSYSTSPLYHQLFEKKDNYAATDFAEGHITQVELAARVANHPNQCADDFMAFLISPTAQKHIVTANIMLPVIQGEIEPHFDALKVQQKMQTPINPTVNPEQLKNWISTWQTTLTK

SEQ ID NO: 2177 - DNA, 1620 bp, Haemophilus influenzae
ttgatgctgtcgttatttcatcatccacaattccgcctgcgtcattatgtgggcggcgttgttgtcatcggcgtgattacgcttttttatggaagtgcgttaagttcaatctttacattgggcgatgaattacaatggcgagcttggtttactgatgattatctacagcatctgattcttttcagttttgggcaagctttactttctaccgttttatctattttctttggtttacttctcgctcgggcattattttataagccattttttggaaaaaagtggttgttaaaattaatgtcgctaacttttgtcttacctgctttagtggtaatttttggtttgatcggcatttatggttcaagtggttggttagcttggcttgctaacctttttggaatgtcgtggcaaggacatatttacggactttcgggaattttaattgcccacctttttttcaatatcccactggcagcacagcttttcttacaaagtttgcaaagtatcccttatcagcaacgtcagcttgcagcccagcttaatttgcaaggttggcaatttgttaaattggtggagtggccggtttttcgtcagcaatgtttgcctacattcagcttaatttttatgctgtgctttaccagttttactgttgttcttacattaggtggtgggcctcaatatacaacattagaaacagcaatctaccaagcgattttatttgaatttgatctgccgaaagcggcactttttgctatgttgcaatttgtattttgcttgattttatttagtttgacatcgcgtttttcgctttctaatcaaaatggcttgagcaatagtaatatttggtttgagaaacctaaaagtgcggtcaaaattttccatattttggttttacttgtttttgtctttttccttttttcgccagtattgaatattcttattagtgcattgagttcatcaaatttactcacagtttggcataattcccagctctggcgtgccttaggctattcactttctatcgcgcccttgtccgcattacttgcattaacgatggcaattgccttattgcttttatcacgccgtttagaatggttgaattatcaaaaaatctcgcaatttattattaatgctggaatggtaattttagccatcccgattttagtgcttgcgatggggttgtttttattattacaagatcgtgatttttccaatattgatttgtttatcatcgttgtattttgtaatgccttaagtgcaatgccttttgttttacgtattttaagcgcaccttttcataacaatatgcgttattacgaaaatctgtgtaatagtctgggaattgtgggttggcaacgtttttatctgattgaatggaaaaccttgcgcgcaccgctgcgttatgcttttgctttaggtttagcgttatctctcggcgattttacggcgattgcgttatttggcaatcaagagtttacttctctaccgcatttgttatatcagcagctagggaattatcgtaatcaagatgcagctgtaactgcagggattttattattgctttgtggcatattgtttgcctttattcacacatatagggatgccgatgatttatctaaataa

SEQ ID NO: 2178 - protein, 539 aa, Haemophilus influenzae
MMLSLFHHPQFRLRHYVGGVVVIGVITLFYGSALSSIFTLGDELQWRAWFTDDYLQHLILFSFGQALLSTVLSIFFGLLLARALFYKPFFGKKWLLKLMSLTFVLPALVVIFGLIGIYGSSGWLAWLANLFGMSWQGHIYGLSGILIAHLFFNIPLAAQLFLQSLQSIPYQQRQLAAQLNLQGWQFVKLVEWPVFRQQCLPTFSLIFMLCFTSFTVVLTLGGGPQYTTLETAIYQAILFEFDLPKAALFAMLQFVFCLILFSLTSRFSLSNQNGLSNSNIWFEKPKSAVKIFHILVLLVFVFFLFSPVLNILISALSSSNLLTVWHNSQLWRALGYSLSIAPLSALLALTMAIALLLLSRRLEWLNYQKISQFIINAGMVILAIPILVLAMGLFLLLQDRDFSNIDLFIIVVFCNALSAMPFVLRILSAPFHNNMRYYENLCNSLGIVGWQRFYLIEWKTLRAPLRYAFALGLALSLGDFTAIALFGNQEFTSLPHLLYQQLGNYRNQDAAVTAGILLLLCGILFAFIHTYRDADDLSK

SEQ ID NO: 2179 - DNA, 648 bp, Haemophilus influenzae
atgatttatctaaataatgtgattttgaatgataaaaccttaccgatgtgctttaatttgagcgtaaatgctggcgaacgtgttgcaattattggcgaaagtggcgcggggaaaagtactttattgaatttaattgctgggtttgaatttcctgctcaaggagaaatttggttaaacgataaaaatcatacgcgtagtgcgccttacgagcgtcctgtttctatgctatttcaagaaaataacctatttccccatttgactgtacaacaaaatcttgccttaggaataaaaccctctttaaaattaaccgcacttgagcaggaaaaaattgaacaggtcgcttgctccgtaggattgggcgattatttagagcgtttaccgaattatctttcgggggggcaaaaacaacgagtggcattggcgcgttgtttgttgcgagataagccaattttgttattagatgagcctttttctgcattagatcagaaacttcgggtagaaatgctggctttaatcgctaaactttgtgacgagaaagatttaacattgctacttgttacccaccaaccatcggaattaatcggttcgatagatcaggtgttagtggtggaaaatggtcagataagtcaattacaaaaaggggcgtaa

SEQ ID NO: 2180 - protein, 215 aa, Haemophilus influenzae
MIYLNNVILNDKTLPMCFNLSVNAGERVAIIGESGAGKSTLLNLIAGFEFPAQGEIWLNDKNHTRSAPYERPVSMLFQENNLFPHLTVQQNLALGIKPSLKLTALEQEKIEQVACSVGLGDYLERLPNYLSGGQKQRVALARCLLRDKPILLLDEPFSALDQKLRVEMLALIAKLCDEKDLTLLLVTHQPSELIGSIDQVLVVENGQISQLQKGA

SEQ ID NO: 2181 - DNA, 1002 bp, Haemophilus influenzae
atgttagcggaaaaattacaaattaactctattacacctcatccaagtgtagaatattggtctgtttgcaaagttgaggcgttatttgaaacgccatttttggaattagtttaccgagcaacgcaagttcatcgtaagcattttaatcctcgcgtgattcagttatccacgttaatgtctatcaaaacggggggatgcccagaagattgtagttattgccctcaatcagcccgttatcatactggcgtacaaaatcagcagttattagatgttgatgagatcgtcgctaaagcaaaaattgcgaaagcgcgtggtgcggggcgtttctgtatgggggctgcttggcgaggccctaagccaaaagatattgagaaagtcacagaaattattaaagccgtgaaatcacttggtttagaaacttgcggtacctttggtttattgcaagacggtatggcggaagatttaaaagaagctggattagattattacaatcataatcttgataccgcaccagaacattatgcagaagtgattggtactcgccgttttgatgatcgtcttagcaccttaggaaaagtgcgcaaagctggattaaaagtgtgttgtggtggcattgtggggatgaatgaaacccgtaaagaacgggctggattaatcgcgagccttgcaaatcttgatccgcaacctgagtcagtgccgattaatcaactcgttaaggttgaaggtacgccgttagctgatgcggaagaattagattggacggagtttgtgcgaacgattgctgttgcacgtattactatgccaaaaagttatgttcgtctttctgcaggtcgcagtggtatgactgaagaaatgcaagcgatgtgttttatggcgggtgcaaattctattttctatggcgataaattacttgttacagataatccagaagaagatggcgatcagttattgatggcaaaattagatttagagccagaaactgcagaaaataaaaagttgtag

SEQ ID NO: 2182 - protein, 333 aa, Haemophilus influenzae
MLAEKLQINSITPHPSVEYWSVCKVEALFETPFLELVYRATQVHRKHFNPRVIQLSTLMSIKTGGCPEDCSYCPQSARYHTGVQNQQLLDVDEIVAKAKIAKARGAGRFCMGAAWRGPKPKDIEKVTEIIKAVKSLGLETCGTFGLLQDGMAEDLKEAGLDYYNHNLDTAPEHYAEVIGTRRFDDRLSTLGKVRKAGLKVCCGGIVGMNETRKERAGLIASLANLDPQPESVPINQLVKVEGTPLADAEELDWTEFVRTIAVARITMPKSYVRLSAGRSGMTEEMQAMCFMAGANSIFYGDKLLVTDNPEEDGDQLLMAKLDLEPETAENKKL

SEQ ID NO: 2183 - DNA, 1998 bp, Haemophilus influenzae
atggcaactcgtagacaattagccaatgcaattcgtgtcttagcaatggattctgtacaaaaagcgaaatctggtcaccctggtgcaccaatggggatggcggatattgcagaagtgttatggcgcgactttttaaaacacaatccaaccaatcctaaatgggctgatcgtgaccgttttgtgctttcaaatgggcacggttctatgttgatttatagtcttttacatttaactggctatgatctttctatcgaagatttaaaacaattccgtcaattacattctaaaaccccaggtcacccagaatatggttatgcccctggtgttgaaaccacaacgggcccgttaggtcaaggtatcactaatgcggtgggtatggcaattgctgagaaaaccttagctggacaatttaaccgtgaaggccatgaaattgtcgatcaccacacttatgtgttcttaggcgatggttgtttaatggaagggatttctcacgaggcttgctctttagcaggaaccttaggtctgggtaaattaatcgcattctacgatgacaacaatatttccattgatggtcatgttgatggctggttcagtgatgacaccgccgagcgttttgaagcttatggctggcaagtaatccgtaatgtagatggtcacaatgcagagcaaattcgtgctgctaccattcttgctcaagcagaaaaagaaaaaccaacgttaattatttgtaaaaccatcatcggctttggttcaccaaataaatcaggttctcatgattcccatggcgcaccattaggtgatgaagaaatcgcattaacccgtaaagcactaggctgggaatatgctccatttgaaattccggctgagtactatgctgaatggtctgcaaaagaaaaaggcgctgcagcagaaaaatcttgggaagaaaaatttgccgcttatgcaaaagcctatcctgaattagcagcagaatttaaacgtcgtgtttctggcgaattaccaacaaactgggcggcagaatctaaagcgttcatcgaaaaattacaagcaaatccagcgagtattgcaagccgtaaagcatcacaaaatgccattgaagcctatgcacacctattgccagaatttttaggaggttctgcagacttagcaagctccaacttaaccttatggagtggttcaaaaccaattcgtgcacacgaaaacgtaggtggtaactacattaactatggtgtgcgtgaatttggtatgtctgccattatgaacggtattgctttacacggcggtttcattccttacggcgcaaccttcttaatgttctatgaatatgctcacaatgcggtgcgtatggcagcattaatgaaacaacgcacattattcgtttatacccacgattccatcggtttaggcgaagatgggcctacacaccaaccagtagaacaaacggcttcactacgcttaattccaaaccttgaaacatggcgtccatgtgaccaagttgaatcagccatcgcatggcaacaagcggttgaacgtcaagatggcccaagtgcgttaattttcactcgtcaaaatcttgctcaaatgaaccgcacttctgcacaattagatgcggttaaacgtggtgcttatgtgttaaaagactgtgatggcacacctgagttaattttcattgcgacaggttctgaagtggaattagcagtgcaagcagccgaagcattaagtgctgaaggtaaaaaagtacgtgtcgtctctatgccaagtactaaccgtttcgataaacaagatgcagcgtaccgtgaaagcgtattgcctgcagcggtaaccaaacgtgttgcgattgaagcgggtattgctgacttctggtataaatacgttggattcaatggtcgtgttgtcggtatgaatagctttggcgaatccgcaccagcagatcaattattcaaactctttggtttcactgttgaaaacgtggtagcaaaagcgaaagaaattctttaa

SEQ ID NO: 2184 - protein, 665 aa, Haemophilus influenzae
MATRRQLANAIRVLAMDSVQKAKSGHPGAPMGMADIAEVLWRDFLKHNPTNPKWADRDRFVLSNGHGSMLIYSLLHLTGYDLSIEDLKQFRQLHSKTPGHPEYGYAPGVETTTGPLGQGITNAVGMAIAEKTLAGQFNREGHEIVDHHTYVFLGDGCLMEGISHEACSLAGTLGLGKLIAFYDDNNISIDGHVDGWFSDDTAERFEAYGWQVIRNVDGHNAEQIRAATILAQAEKEKPTLIICKTIIGFGSPNKSGSHDSHGAPLGDEEIALTRKALGWEYAPFEIPAEYYAEWSAKEKGAAAEKSWEEKFAAYAKAYPELAAEFKRRVSGELPTNWAAESKAFIEKLQANPASIASRKASQNAIEAYAHLLPEFLGGSADLASSNLTLWSGSKPIRAHENVGGNYINYGVREFGMSAIMNGIALHGGFIPYGATFLMFYEYAHNAVRMAALMKQRTLFVYTHDSIGLGEDGPTHQPVEQTASLRLIPNLETWRPCDQVESAIAWQQAVERQDGPSALIFTRQNLAQMNRTSAQLDAVKRGAYVLKDCDGTPELIFIATGSEVELAVQAAEALSAEGKKVRVVSMPSTNRFDKQDAAYRESVLPAAVTKRVAIEAGIADFWYKYVGFNGRVVGMNSFGESAPADQLFKLFGFTVENVVAKAKEIL

SEQ ID NO: 2185 - DNA, 138 bp, Haemophilus influenzae
gtgcaaataattaaagaaaaactaataaaatcaaccatgcttgcaacgattattgtgctaagcctaactgcacttggcgttatcttatttggtgtaaaacaagtattttttaagtcattatcgctgttcttatcataa

SEQ ID NO: 2186 - protein, 45 aa, Haemophilus influenzae
MQIIKEKLIKSTMLATIIVLSLTALGVILFGVKQVFFKSLSLFLS

SEQ ID NO: 2187 - DNA, 945 bp, Haemophilus influenzae
atgcaaattcaatgtttcgaaagtattacacaaaaatacccacaatttcctaccgcacttttggctaatgaggaacctatacagaacggagagccttttatcttatacggcacaaagttggacataagcacgctagaaaaatttcaacaaaagtgcggtcaaaattttcagatttttgatgtttggatggtagcgaaaaatattatcgtcttattgaaaggtcaatggtttgctgacttcattaactttgctcatgatgttgaagtggatattgctaaattagatttcaaccctaaattgtctcaagcagggttgttggtgatggatatggattctaccgctattcaaattgagtgtattgatgaaattgcgaaactagcgggtgttggcgaacttgtttctgcgattacggaaagtgcaatgaggggggaattagatttcgagcaaagtttgcgttgtcgagtgggtacattaaaaggtgcaccagaaattatcttacagcaagttagagagaatttaccgctaatgtcaggattagttgaaacgatccaaaccttacaaaaatatggctggaaaactgcaattgcttcaggtggatttacttattttgcggattatttgaaagccttattgcaacttgattttgctgcatcaaatcaatttgatattgaagatggaaaactcactggcttagttaaaggcgatgtggttgatgcccaatataaagctaaaacattgcaacatttgttagagaaatacggtattgattcacaatattctattgctattggcgatggtgcaaatgacttggcaatgatgaatgtggcagggctaggtgttgcgttccacgctaaacctaaagtgcaacaacaagcgcaaattgtggtaaacttcgctgacttaaccgcacttttatgccttctaagtgccaatgatagaatttaa

SEQ ID NO: 2188 - protein, 314 aa, Haemophilus influenzae
MQIQCFESITQKYPQFPTALLANEEPIQNGEPFILYGTKLDISTLEKFQQKCGQNFQIFDVWMVAKNIIVLLKGQWFADFINFAHDVEVDIAKLDFNPKLSQAGLLVMDMDSTAIQIECIDEIAKLAGVGELVSAITESAMRGELDFEQSLRCRVGTLKGAPEIILQQVRENLPLMSGLVETIQTLQKYGWKTAIASGGFTYFADYLKALLQLDFAASNQFDIEDGKLTGLVKGDVVDAQYKAKTLQHLLEKYGIDSQYSIAIGDGANDLAMMNVAGLGVAFHAKPKVQQQAQIVVNFADLTALLCLLSANDRI

SEQ ID NO: 2189 - DNA, 492 bp, Haemophilus influenzae
atgccatcttttgatattgtttctgaaattactttacacgaagttcgtaatgcagtggaaaatgcaaaccgtgtgcttagcacgcgttatgattttcgtggtgtcgaagcggtaattgaattaaatgaaaaaaatgaaacgattaaaattactacagaatctgatttccaacttgaacaattaattgagattttaattggatcttgtattaaacgtagtatcgagcacagttctttagatattccagcagaaagcgaacaccacggtaaactttacagtaaagaaataaaacttaaacagggtattgaaacagagatggcgaagaaaattactaaattagtaaaagattctaaaatcaaagttcaaactcaaattcagggcgaacaagtgcgtgtgacaggtaagtcacgcgatgacttacaagcagtgattcaacttgtaaaaagtgctgaattaggtcagccattccaatttaataattttagagattag

SEQ ID NO: 2190 - protein, 163 aa, Haemophilus influenzae
MPSFDIVSEITLHEVRNAVENANRVLSTRYDFRGVEAVIELNEKNETIKITTESDFQLEQLIEILIGSCIKRSIEHSSLDIPAESEHHGKLYSKEIKLKQGIETEMAKKITKLVKDSKIKVQTQIQGEQVRVTGKSRDDLQAVIQLVKSAELGQPFQFNNFRD

SEQ ID NO: 2191 - DNA, 948 bp, Haemophilus influenzae
atgatcaacgcgtttgctatcaatgattcccgcttggttcgcattgacgaagaccaaactgatctcaatactgccatttggcttgatttacttgagccgacaggcgaagaacgtgaaatgctacaagaaggtttaggtcagagcctagcatcttttctagaactggaagatatcgaggcttccgcccgtttctttgaagacgaagatggtttacaccttcactcatttttttattgcgaagatgaagacaattatgctgatttagcgagcgtcgcttttactattcgtgatggtcgtttatttacgttgcgtgatcgtgagctacccgcattccgtttataccgtatgcgttcacgtagccagcgtttgttagaatgcaattcctatgaagttttactggatttatttgaaacgaaaattgagcaattagcggacgtgattgaaaatatttatgcagatttggaagagttaagtcgcgttattttaaacggaaaacaagatgaagcctttgatgaagcattaaatacactcacggaacaagaagatacgagctcaaaagttcgtttgtgcttgatggatactcaacgtgcattaggttttttggttcgcaaaactcgcttaccaactaatcagttagaacaagcacgagaaatcttacgagatattgaatctttgcaaccgcataatgaatcattattccaaaaagtaaactttttaatgcaagctgcaatgggttacatcaatattgaacagaacaaaattatgaaattcttctcggttgtttctgtgatgttccttcctgcaacattagtcgcgtctacttatggtatgaactttgattttatgcctgaattacattttaaatatggctatccaatggcaattggattaatgatcgcagccgcactgacaccatatatttattttagaagaaaaggatggttatga

SEQ ID NO: 2192 - protein, 315 aa, Haemophilus influenzae
MINAFAINDSRLVRIDEDQTDLNTAIWLDLLEPTGEEREMLQEGLGQSLASFLELEDIEASARFFEDEDGLHLHSFFYCEDEDNYADLASVAFTIRDGRLFTLRDRELPAFRLYRMRSRSQRLLECNSYEVLLDLFETKIEQLADVIENIYADLEELSRVILNGKQDEAFDEALNTLTEQEDTSSKVRLCLMDTQRALGFLVRKTRLPTNQLEQAREILRDIESLQPHNESLFQKVNFLMQAAMGYINIEQNKIMKFFSVVSVMFLPATLVASTYGMNFDFMPELHFKYGYPMAIGLMIAAALTPYIYFRRKGWL

SEQ ID NO: 2193 - DNA, 546 bp, Haemophilus influenzae
atggaattatcccaaaccgcattatttatcggatcaattattaatctttacgcacttgtattaatcttacgagcttggttgcagtttgctcgtgtggattattacaaccctgtttcaacatttgcagtcaaaatgactgatccagtattaaaacctctgcgtaaagttatgccaacggtaaaaaatattgatacttccgcattactgcttgtatttattattggtatgttaaaaggtattatttattttggcttatcagtaaatgtactcttagtattgggcgtattaactgtattgaaaagcattggtttagctattttctatgtgctttttattggggctgttttaagttggtttaatcgaggtaataattctataagttatgccttttatcaactctccgaaccacttttaaaaccaatccgtcgattattacctacattaggaatgattgatttttctccgatggtcgttgtgtttatcttattgtttttaaacaattttatgcttgatcttctaggtgggctttggattatcgctggttaa

SEQ ID NO: 2194 - protein, 181 aa, Haemophilus influenzae
MELSQTALFIGSIINLYALVLILRAWLQFARVDYYNPVSTFAVKMTDPVLKPLRKVMPTVKNIDTSALLLVFIIGMLKGIIYFGLSVNVLLVLGVLTVLKSIGLAIFYVLFIGAVLSWFNRGNNSISYAFYQLSEPLLKPIRRLLPTLGMIDFSPMVVVFILLFLNNFMLDLLGGLWIIAG

SEQ ID NO: 2195 - DNA, 885 bp, Haemophilus influenzae
atggtgttaaatcgctcacatattgtgaggttatatctaattaaagttatgtgtcaattactcggaatgaattgtaatacgccaacggatattgttttttcttttgaaggtttccgtcgtcgcgcaggtttaacagattgccattcagatggctttggaatcgcgttttttgaaggacgtggtgtacgtatttttcgtgataatcaagcagccagtctttcccccatcgcagattgtataaaacaatataatattaaatctcttaatgttattgcacatattcgtaaagcaacacaaggcgaagtcaatattgaaaacacccatccgttcattcgtgaaatttggggacaaaactgggtttttgcgcataatggtaatttaaaaaacttaccagatatgacagatcattttttacagccaataggttctacagattctgaagctgctttctgttatatggctgaatatcttaaaaatactttccgcaaaaaaccaagtgaaatggaaatttttgaagcaattcaaaaagtaacaaaagaacttgctcaacacggtacgtttaatttcattctttctaatggcgagtggatgattgcacattgctcaacaaacttacattatgttatgcgaaaagcaccttttggcaaagctcaccgtattgatgatgatggagtaattgattttagctattatgcaaaagcaggagataaggtcaatatcatcacaacatttcctttaaccaaaaatgaatcttggacaaaaatggaaaatggtggatttgtgttttttaaaaatggagagaaaatcgccgaagttattgggacgccaaaagaagcgattgatgatggtactttaggtaataggacaataaattctgctatttaa

SEQ ID NO: 2196 - protein, 294 aa, Haemophilus influenzae
MVLNRSHIVRLYLIKVMCQLLGMNCNTPTDIVFSFEGFRRRAGLTDCHSDGFGIAFFEGRGVRIFRDNQAASLSPIADCIKQYNIKSLNVIAHIRKATQGEVNIENTHPFIREIWGQNWVFAHNGNLKNLPDMTDHFLQPIGSTDSEAAFCYMAEYLKNTFRKKPSEMEIFEAIQKVTKELAQHGTFNFILSNGEWMIAHCSTNLHYVMRKAPFGKAHRIDDDGVIDFSYYAKAGDKVNIITTFPLTKNESWTKMENGGFVFFKNGEKIAEVIGTPKEAIDDGTLGNRTINSAI

SEQ ID NO: 2197 - DNA, 108 bp, Haemophilus influenzae
ttgattgttgcgataaatccaaaaaccttgaaaattttggccgcactttttgtgttgaaaacttatactgacgcacattttctaactcgtgccttggaaattaaataa

SEQ ID NO: 2198 - protein, 35 aa, Haemophilus influenzae
MIVAINPKTLKILAALFVLKTYTDAHFLTRALEIK

SEQ ID NO: 2199 - DNA, 102 bp, Haemophilus influenzae
atggaaaaattagctgtagaaaataaaattcaatcagaacttaaattcttttctattcaaatgtattttccatttatgaagaaaataacaaatttaatctga

SEQ ID NO: 2200 - protein, 33 aa, Haemophilus influenzae
MEKLAVENKIQSELKFFSIQMYFPFMKKITNLI

SEQ ID NO: 2201 - DNA, 336 bp, Haemophilus influenzae
gtgaaagataaagttgagataaataaacaagtgggggcttctattgcaaaatatcggaaggcctcaggtttatcacaagcaaaggtggcagaaatattgggattaagcaatgatgccatttctagaatggagcgtggtaggattgcattaaatgtagagcgtttatgtgaatttgcaacactgtttcaatgccgtgtgtccgatttgatcacagatagtagtttgcaaccatcggatcaaatttatcaacttgatcgattattaaatcaattagatcatacggaaagaaaaaaattaattttattgattgaacaaatgatcgaatggaaaaattag

SEQ ID NO: 2202 - protein, 111 aa, Haemophilus influenzae
MKDKVEINKQVGASIAKYRKASGLSQAKVAEILGLSNDAISRMERGRIALNVERLCEFATLFQCRVSDLITDSSLQPSDQIYQLDRLLNQLDHTERKKLILLIEQMIEWKN

SEQ ID NO: 2203 - DNA, 543 bp, Haemophilus influenzae
ttgtttatttatctcaactttatctttcacgccattttctttattttatttttgaatggaacgagtatagacattcactactcaataaaaagagaattaaaatctttcaataaagagtttaattcttacaataagcgagattttatacaaaatgttttttttgcccgaatcaaccgtgcagatacttcacataaaatacgtgcatatattgaaatcaagagaataattatgtcgaacaaacacgaaaaactagctgaacgtttagcttcaaactggagaaatgatgatgaagataaagttgatgagttaatgaaatattttgatatcagctctcaagaatcacacttattaaaattaaaatctgtgatggagaaatttaataatgcattagaaatgatatttcctaaacgtaaaaataaggaaatagaaataaatgaaaatgagtctttattttctaatatttggggggtgaatttatcatcattagaaagacgcaaacaaaacaatgaacaaataaaaaagttatttccttggttaaactag

SEQ ID NO: 2204 - protein, 180 aa, Haemophilus influenzae
MFIYLNFIFHAIFFILFLNGTSIDIHYSIKRELKSFNKEFNSYNKRDFIQNVFFARINRADTSHKIRAYIEIKRIIMSNKHEKLAERLASNWRNDDEDKVDELMKYFDISSQESHLLKLKSVMEKFNNALEMIFPKRKNKEIEINENESLFSNIWGVNLSSLERRKQNNEQIKKLFPWLN

SEQ ID NO: 2205 - DNA, 657 bp, Haemophilus influenzae
atgtcactgacagaacaattagaaaatttaaacgattactacaaagaaaatcgtgatacctttaacgataactttcgcttaaaaatgcaccgcacattaagctggttaaaaaaagccaatgaagaagagaacttagacttcaaatttatcgcactttggattgccttcaatgcagcctatgccgatgagttaagtaaagaagaaattgaacgtaaggtatttcatcaatttattattcgcctttgtgaattggattctgaacatctactttatggaattatttgggatgaatttcctggtacagtgaaagctctactagatacgccttatacattccaaccattttgggatgctcataatggtctattagcaggaaaagaatggaaagtaatgttttctgcagcgaagaaaaaagcccattttgcatttgaagagcaaaaaacagcagaagtattggaagtggtatttggtcatttatacacattgagaaatcagcttatacatggtggagctacttatgaaagtagtaccaaccgcaaacagatagaggaatcctgtgcattactgtcattattcgtacctgcaatggtaaaaattatgttgcgtaatgattctgagccaagttggggaaaacctttttatcctgttgtaaaataa

SEQ ID NO: 2206 - protein, 218 aa, Haemophilus influenzae
MSLTEQLENLNDYYKENRDTFNDNFRLKMHRTLSWLKKANEEENLDFKFIALWIAFNAAYADELSKEEIERKVFHQFIIRLCELDSEHLLYGIIWDEFPGTVKALLDTPYTFQPFWDAHNGLLAGKEWKVMFSAAKKKAHFAFEEQKTAEVLEVVFGHLYTLRNQLIHGGATYESSTNRKQIEESCALLSLFVPAMVKIMLRNDSEPSWGKPFYPVVK

SEQ ID NO: 2207 - DNA, 141 bp, Haemophilus influenzae
atgcagttctctattctctttcggaatgccattaaacttgcgtcaatggcattttgcttgattccaaaaattctaaattccgtttacgtggttgtgattttcagtaaaatgcgagctgtgattaatgccgaaaatggctaa

SEQ ID NO: 2208 - protein, 46 aa, Haemophilus influenzae
MQFSILFRNAIKLASMAFCLIPKILNSVYVVVIFSKMRAVINAENG

SEQ ID NO: 2209 - DNA, 501 bp, Haemophilus influenzae
atgaaaaacgaagcctattatcaggcttatttaagccaccatcacatttctcgtagaggactattgcgtcatgtatttccagctacaaaatcaacaatagaaaaaacgcagtctcgtcctcccttttcagcacgagaagatttattttccgccgtctgcaatggttgtggggaatgcgcttcagcttgccctaatggtttaattcaactaaaacagcaacaagccacccttgaaattgaccacgcaccttgtgatttgtgtggtaaatgcgcagaagtttgtccgacaaatgcactacatcctaattttccagcagatacattacttcgtccacaattttcctcagcctgtttaatcctacaaaatcaaacctgtccagactgccaaaccgcttgcccacaacaagcaatctccagcactttagagattgataatgaacgttgcaatgggtgcggagaatgtaaaattacctgttttgtcgcagccattacacttaaataa

SEQ ID NO: 2210 - protein, 166 aa, Haemophilus influenzae
MKNEAYYQAYLSHHHISRRGLLRHVFPATKSTIEKTQSRPPFSAREDLFSAVCNGCGECASACPNGLIQLKQQQATLEIDHAPCDLCGKCAEVCPTNALHPNFPADTLLRPQFSSACLILQNQTCPDCQTACPQQAISSTLEIDNERCNGCGECKITCFVAAITLK

SEQ ID NO: 2211 - DNA, 612 bp, Haemophilus influenzae
atgcaaaatactcttcaacaaatttctatttatgggcgtttactcggtgcagtattttactatgagcctaatgatgcacgacttactgatattttgacattctttcgccaaccaaattggatgcaagaatgggaaatttcatttgatgtaaaaacacataaaaaaatcaccgcacttattgaaaaagggctgcaacaaaatatcactgaacaatatcagtatttatttattggtccaaatgaattacctacgccaccttggggatccgtatatcttgatcctgaatgtgttatttttggtaattctctcttagcattacgcgatttcttacaacaacatcaaatcgcatttcaaacacaacaagatgaaccagaagatcatattggcttaatgctaatgcttgctgcatatttagcagaaaatcgaccgcacttattaaccaaatttctacgtgaacacttcttaacttgggcgtatcatttccttgaacaactaagcaaaatagaaaattctgatttttatcaagctcttgcattacttaccataaaaactttacaacaatggcaagtagatttacatattaatgtaccgacagtaagattttatcgataa

SEQ ID NO: 2212 - protein, 203 aa, Haemophilus influenzae
MQNTLQQISIYGRLLGAVFYYEPNDARLTDILTFFRQPNWMQEWEISFDVKTHKKITALIEKGLQQNITEQYQYLFIGPNELPTPPWGSVYLDPECVIFGNSLLALRDFLQQHQIAFQTQQDEPEDHIGLMLMLAAYLAENRPHLLTKFLREHFLTWAYHFLEQLSKIENSDFYQALALLTIKTLQQWQVDLHINVPTVRFYR

SEQ ID NO: 2213 - DNA, 840 bp, Haemophilus influenzae
atgaatacaggattatatgaactgccattagtattttttacagttttggcacaaagtgcggtcggtgcttggcttgttttcacatttgtactattaaatgagaaaaatacaaaaagtcgcacttatattcataaagtaatgtttgtgattttggctttactaggtattggatttattgcttccattatgcatcttggcttacctatacgtgcatttaattcacttaatcgagtcggctcatcaatgatgagtaatgaaattgccgctggtgcaatatttttcacattagcaggtttctactggctgattgcaattttaggtaaaatgccagtttcacttggaaatgtatggcgaattgtgaccgcccttatcggcatactatttatgtatgtaatgaatcaggtttaccatattacaagcataccaacttggaataatgcattaacctcttggtcattctaccttaccgttgtattaggtggattaacattgagctatgcgttattaatccctaataaacaacgtgaatatcagcttcagcatctgccaagtttattcgccattggggtatcattggtcgcaatagtagccatatatcaaggcttcaatttacacaatattcacagtgctattcaaaatgccgctgacctcgtaccaaattatgccataatgaccgtaactcgcttatgtttactttccattgtagctttcctcttattccgagtgaaaaacataggactattaggtatttccgttctattaacgttagtagctgaaggcatcggtcgcgtattattttatggattacatatgacttacggtatggcgattggtggttaa

SEQ ID NO: 2214 - protein, 279 aa, Haemophilus influenzae
MNTGLYELPLVFFTVLAQSAVGAWLVFTFVLLNEKNTKSRTYIHKVMFVILALLGIGFIASIMHLGLPIRAFNSLNRVGSSMMSNEIAAGAIFFTLAGFYWLIAILGKMPVSLGNVWRIVTALIGILFMYVMNQVYHITSIPTWNNALTSWSFYLTVVLGGLTLSYALLIPNKQREYQLQHLPSLFAIGVSLVAIVAIYQGFNLHNIHSAIQNAADLVPNYAIMTVTRLCLLSIVAFLLFRVKNIGLLGISVLLTLVAEGIGRVLFYGLHMTYGMAIGG

SEQ ID NO: 2215 - DNA, 618 bp, Haemophilus influenzae
atggaacaatatggtttttattttgattctgaacgttgcacaggctgtaaaacttgtgaattagcctgtaaggattacaaagatcttggcacagaagtcaattttcgtcgtatttatgaatatacaggtggtcagtggaatcaacaagcagatggatgctggcatcaaaatatatttgcttattatatgtctatttcttgtaatcattgtgcagatcctgcttgtacaaaagtttgcccaactggtgcaatgcacaaaaatgcagatggtttcgtgatcgtcaatgaagaaatttgtatcggttgtcgttattgtcatatggcgtgtccttatgatgcaccgcaatatgatgcacaaaaaggtcatatgacaaaatgtgatggatgttattctcgcgtaaaatcaggtcaaaaaccgatttgtgttgatgcctgcccactacgagcattggatttcgctcctattgatgaacttcgaacaaaatatggcacacaagcctccatcgcaccactaccaccgactgatatcactcaaccaaatttagtggtaaaacccaataaatacgctcgtttaagtggcgatacaagtgggttcttaggaaacccaagagaggtgtaa

SEQ ID NO: 2216 - protein, 205 aa, Haemophilus influenzae
MEQYGFYFDSERCTGCKTCELACKDYKDLGTEVNFRRIYEYTGGQWNQQADGCWHQNIFAYYMSISCNHCADPACTKVCPTGAMHKNADGFVIVNEEICIGCRYCHMACPYDAPQYDAQKGHMTKCDGCYSRVKSGQKPICVDACPLRALDFAPIDELRTKYGTQASIAPLPPTDITQPNLVVKPNKYARLSGDTSGFLGNPREV

SEQ ID NO: 2217 - DNA, 2421 bp, Haemophilus influenzae
atgagtaactttaatcaaataagtcgccgagattttgtcaaggcgtcatctgcgggagctgcactggcagtttcaaatcttactttacctttcaatgtaatggctaaagagacacaacgcctcaatgaaaataatcaagaacgtattgtttggagtgcttgtacagtaaactgtggtagccgttgtccattacgaatgcacgtaaaagataaccgaatcacttatgtggaaaccgataatacggggacagaaacatataatcttgatcatcaggttcgtgcttgtctacgtggacgttctatgcgtcgtcgagtgtataacccagaccgtttaaaatatccaatgaaacgtataggtaaacgcggagaaggtaaattcaaacgaatcagttgggatgaggctttaactgaaattgcatacgcattgaaacgcaatatcaaaaaatatggcaatgaatcaatttatttaaactatggtacgggaacactcggtggcacaatggctaaatcttggccacctgcatccactatgatcgctcgttttatgaattgtattggtggatatttaaaccattatggtgattacagcaccgcacaaattgcagtcggtttagattatacctatggtggtggttgggcattgggaaatggaatggctgacattgaaaacaccaaattaatagtgttattcggtaataatcctgcagaaactcgtatgagtggaggtggtttaacttattgtattgaacaagccaaagctcgttccaatgccaaaatgattattatcgatcctcgttataatgatactggtgcagggcgtgaagatgagtggatcccaattcgtccggggactgatgcagcccttgttgctgcccttgcttatgtaatgattcaagaaaatctcgtggatcaacctttcttagataaatattgtgttggttatgatgaaaaaacattacctgcggatgcccctaaaaatggtcattataaagcctatattttaggttatggtaatgatggtatcgctaaaactccagaatgggcggctaaaatcacgggtattccggcggagagaattattaaactcgcacgtgaaattggcagcacaaaacctgcctttatttcccaaggttgggggcctcaacgtcgtagtaatggagaattaatctctcgtgccattgcgatgttgccaatcttaacaggtaatgttggaattcacggcggtaacactggtgcacgtgaaagtgcgtatagcattccatttgtgcggatgccaacgctaaaaaatcctatgaaagcaagcattccaatgtttttatggacagatgcaattattcgtggcacagaaatgaccgcacttacagatggtattcgtggtgttgataaattatcgtccccaattaaagtaatttggaattacgcaagtaactgtttgattaatcaacacgcacaaatcaatcgtactcacgatattttacaagatgatacgcaatgtgaaatgatcattactattgataatcatatgacatctactgccaaatacagtgatattttattaccagattgtacaacttcagaacaaatggatttcgctttagatgcctttgtatccaatatggcatatgtcatttttgcagatcaagtgatcaaaccatcttttgaatgtagacctatttacgatatgttaagtgatttagctgagaaaatgggcgtaaaagaaaaatttactgaaggaagaacacaagaagaatggttacgccatatttatgagcaatctcgagaaaaattacctgaattacctacttttgaagaatttagacaacaaggtatttttaaaaaagttgatcctaatggctttaaagttgcatacaaagatttccgtgataatccagaagcccatccacttaaaacgccatctggcaaaattgaaatttattcttctcgtctagctgaaatagcaaaaacttggaaattagcagaagatgacgtaattcatcccttacctattcacgcccaaagttttgagcattacggtgatccattaatggaaaaatatccgttacaactaagtggttttcactataaagcgagaacccattcaacttatggcaatgtggatgtattaaaagcagctaatccacaagaagtttggatgaatcctattgatgcaaaacctcgtaatattaaaaatggcgatatgattcgtatctttaatgatcgaggcgaagtacatattaatgtaaaaattacaccccgtattattccaggggttgtggcattaagcgagggggcttggtatgcaccagataaagatcgtatcgatcattcaggttgcattaatgtacttacgacacaacgcccatcaccgcttgcgaaaggtaatccgcaacattctaatttagttcaagtggaacgtttgtag

SEQ ID NO: 2218 - protein, 806 aa, Haemophilus influenzae
MSNFNQISRRDFVKASSAGAALAVSNLTLPFNVMAKETQRLNENNQERIVWSACTVNCGSRCPLRMHVKDNRITYVETDNTGTETYNLDHQVRACLRGRSMRRRVYNPDRLKYPMKRIGKRGEGKFKRISWDEALTEIAYALKRNIKKYGNESIYLNYGTGTLGGTMAKSWPPASTMIARFMNCIGGYLNHYGDYSTAQIAVGLDYTYGGGWALGNGMADIENTKLIVLFGNNPAETRMSGGGLTYCIEQAKARSNAKMIIIDPRYNDTGAGREDEWIPIRPGTDAALVAALAYVMIQENLVDQPFLDKYCVGYDEKTLPADAPKNGHYKAYILGYGNDGIAKTPEWAAKITGIPAERIIKLAREIGSTKPAFISQGWGPQRRSNGELISRAIAMLPILTGNVGIHGGNTGARESAYSIPFVRMPTLKNPMKASIPMFLWTDAIIRGTEMTALTDGIRGVDKLSSPIKVIWNYASNCLINQHAQINRTHDILQDDTQCEMIITIDNHMTSTAKYSDILLPDCTTSEQMDFALDAFVSNMAYVIFADQVIKPSFECRPIYDMLSDLAEKMGVKEKFTEGRTQEEWLRHIYEQSREKLPELPTFEEFRQQGIFKKVDPNGFKVAYKDFRDNPEAHPLKTPSGKIEIYSSRLAEIAKTWKLAEDDVIHPLPIHAQSFEHYGDPLMEKYPLQLSGFHYKARTHSTYGNVDVLKAANPQEVWMNPIDAKPRNIKNGDMIRIFNDRGEVHINVKITPRIIPGVVALSEGAWYAPDKDRIDHSGCINVLTTQRPSPLAKGNPQHSNLVQVERL

SEQ ID NO: 2219 - DNA, 1110 bp, Haemophilus influenzae
atgaagaaacttatcgcagttgcggtgctttctgcatgtggctcgttagctcatgcaaacactaatattccaaactacaatacagacgcccatctttacgaattcacgcaaacctatgatttagttgtgccaaaaggctcgcaaggacaaaccaatttatgggttccattaccatttaatggggaataccaacaagtgaaattgattcactttgaaggtaattacatgaatgcctatgtaacagaaaacaataaatacggagcgaaaaccttatttgccacttgggataaagatgcacaaaaacgtgatttaaaagtcacgatggtcattgaaacaaaagaccgtgaaccgatggtgaaaggtgctttagagaattatactccgccaaaagatattcagtattccgtggatgtacaagaatacttaaaagctactccacatattaaaactgatggcattgtgaaagaatttgctgacaaaatcgtaggtaaagaaactaatccattgaaaaaagcagaacttattcaccgttggatcgtaaaaaatatggaacgtgataattctgtattaggttgtggcgacggcgatgtagaaaaaattcttaccactggcgtattaaaaggtaaatgtaccgatattaattctgtatttgtggcacttgctcgtgctgcaggcatccctgctcgtgaaatttttggtattcgcttaggtgcggcagagaaaatgggcaaatattccaaaggtgccttcggtagtgcaaatgaacaaggcatcgcaaacgtaagtggcggtcagcactgtcgcgctgaattctaccttgcaggatttggatgggtaccagttgattccgcagacgttgccaaaatgcgtttagcagagaaaaaatctgttgaagataaagatacacaagccgtagcaaaatatttgtttggtaactgggaagcaaactgggtaggatttaatcatgcccgtgacttcgatttatatccacaaccagaactggctccaatcaataacttcggctatccatatgcagaagtaggtggcgatccgttaaattcctttgacccaaaagaatttaaatatgactacgtatctaaaaaactctaa

SEQ ID NO: 2220 - protein, 369 aa, Haemophilus influenzae
MKKLIAVAVLSACGSLAHANTNIPNYNTDAHLYEFTQTYDLVVPKGSQGQTNLWVPLPFNGEYQQVKLIHFEGNYMNAYVTENNKYGAKTLFATWDKDAQKRDLKVTMVIETKDREPMVKGALENYTPPKDIQYSVDVQEYLKATPHIKTDGIVKEFADKIVGKETNPLKKAELIHRWIVKNMERDNSVLGCGDGDVEKILTTGVLKGKCTDINSVFVALARAAGIPAREIFGIRLGAAEKMGKYSKGAFGSANEQGIANVSGGQHCRAEFYLAGFGWVPVDSADVAKMRLAEKKSVEDKDTQAVAKYLFGNWEANWVGFNHARDFDLYPQPELAPINNFGYPYAEVGGDPLNSFDPKEFKYDYVSKKL

SEQ ID NO: 2221 - DNA, 363 bp, Haemophilus influenzae
atgactacgtatctaaaaaactctaataaatccttttgggttgccatagccgtcgcactaagtgctgcggtggcatcaaccttgtgctgcatcgcaccattaatttatttagtatttggtgtgtcgtccacttggttgattggcttaggcgaatatgattatttgcgcattcctatgcttatcatttcattatgtgcctttgcctatggattttggctgttgatgttttccaaaaaaatcatttgtagcaaatatatttcccgtaaaaaacttatcgttttatattggattgtatttatcgtgatgatttttttcttaacctatccaacaattttaccttggattttagaattagctaattag

SEQ ID NO: 2222 - protein, 120 aa, Haemophilus influenzae
MTTYLKNSNKSFWVAIAVALSAAVASTLCCIAPLIYLVFGVSSTWLIGLGEYDYLRIPMLIISLCAFAYGFWLLMFSKKIICSKYISRKKLIVLYWIVFIVMIFFLTYPTILPWILELAN

SEQ ID NO: 2223 - DNA, 279 bp, Haemophilus influenzae
atgaagaaattatgtaccgcacttttgctttcgctgtttgcaatttctttcgctcatgcgaatgaaaccaaacaaattgtgctaaaagtaaaggaaatgaattgccagctttgtgcttacttagtcaataaagaactgcgtaatatcaatggcgttatttcaacaaaagcatctattaaagatggtttagtgacggttgtggaagatccaaaagtcacaaaccaacaattattcgatgcaattcacaagctgaaatatactgctgaagtcgtgaattaa

SEQ ID NO: 2224 - protein, 92 aa, Haemophilus influenzae
MKKLCTALLLSLFAISFAHANETKQIVLKVKEMNCQLCAYLVNKELRNINGVISTKASIKDGLVTVVEDPKVTNQQLFDAIHKLKYTAEVVN

SEQ ID NO: 2225 - DNA, 1845 bp, Haemophilus influenzae
atgtttaacaaaattttttcgtggtttgaaaatcgtttaaatccctatccagaaagcaatccaacaacacctaaaaaaggtttgttccgttttatttggtctagtattacaggaatgaaaggctggatttttttgctcgcaattttaaccgtaggtacaggtgtaatggaagctgtattattccaatttatgggaacgcttgtagattggttaggcacatttacacctgaaagattatggcaagaaaaaagtcatttattaattggaatggctgctctattacttattagtattgtgtggggatttttagcttcggccgtgcatttacaaaccttacaaggcgtatttccaatgcgattacgttggaatttccatcgtttaatgcttggacaaagtttaagtttttatcaagacgaatttgcaggtagagtatccgcaaaagtaatgcaaaccgcccttgcagtacgtgacacagtacttacacttgcaaatatgttcgtttatgtattggtatattttattacctctggcgtagtgctagtggcattagattcttggttcttattaccatttattacttggattatactcttcggtttgatcctacgaaccctaattcctaaactatcaaaaaccgcacaacgacaagctgatgctcgttctttaatgacaggacgcattacagatgcttattctaatattgctacagtaaaattattttctcacggctcacgcgaagctacttatgccaagcgttctatgcaagattttatggtaacagtacacgcccaaatgcgcttagcaacatcactagatacactcacttacgctacaaatattctacttacgttaagtactgcaatacttggtattattttatggaaaaatggtcaagttggcgtgggtgcaatagcaacggcaacggcaatggcattacgcgcaaatgggctttctcgctggattatgtgggaatctgcccgtttgtttgagaatatcggaaccgtaaacgacggaatgaatactttaaccaaacctcacaccattgtggataaaccacaagcgtcaccgttacaagtgaaacaaggggaaattaagtttaacaatattacctttgcttacgatccgacaaaaccattactcaatcatttcaatctcactatcaaaccaggggaaaaggttgggttaatcggtcgttctggtgcaggaaaatctacgattgtgaacttattgcttcgcttttatgaagcacaacaaggcgaaattaccattgatggacaaaatgtactcaatgtgcaacaagaaagcttacgtcgccaaatcggtttagtcactcaagacacttcgttgctacatcgttctgtacgtgacaatattatttatggtcgcccaaatgctactgatgaagaaatggttttagctgctgaacgagcggaagccgctgatttcatcccatttctcagtgattctcaaggtagaaaaggctatgatgcccatgtgggagaacgcggggtaaaactttctggtggtcagcgtcagagaattgccattgctcgtgtaatgttaaaagacgcaccaattctattgttagatgaagccacaagtgcattggattcagaagtggaagtggcaatacaagaaagtctcgataagatgatggaaaataaaactgtgattgccattgcccatcgtttatccaccatcgcagcgatggatcgcctgattgtgcttgataaaggacaaattgtcgaacaaggtacgcacgccgaattactagagctcaatggtctgtacgctaaactttggaatcatcaaagtggcggatttttaagcgaaagtgctgaataa

SEQ ID NO: 2226 - protein, 614 aa, Haemophilus influenzae
MFNKIFSWFENRLNPYPESNPTTPKKGLFRFIWSSITGMKGWIFLLAILTVGTGVMEAVLFQFMGTLVDWLGTFTPERLWQEKSHLLIGMAALLLISIVWGFLASAVHLQTLQGVFPMRLRWNFHRLMLGQSLSFYQDEFAGRVSAKVMQTALAVRDTVLTLANMFVYVLVYFITSGVVLVALDSWFLLPFITWIILFGLILRTLIPKLSKTAQRQADARSLMTGRITDAYSNIATVKLFSHGSREATYAKRSMQDFMVTVHAQMRLATSLDTLTYATNILLTLSTAILGIILWKNGQVGVGAIATATAMALRANGLSRWIMWESARLFENIGTVNDGMNTLTKPHTIVDKPQASPLQVKQGEIKFNNITFAYDPTKPLLNHFNLTIKPGEKVGLIGRSGAGKSTIVNLLLRFYEAQQGEITIDGQNVLNVQQESLRRQIGLVTQDTSLLHRSVRDNIIYGRPNATDEEMVLAAERAEAADFIPFLSDSQGRKGYDAHVGERGVKLSGGQRQRIAIARVMLKDAPILLLDEATSALDSEVEVAIQESLDKMMENKTVIAIAHRLSTIAAMDRLIVLDKGQIVEQGTHAELLELNGLYAKLWNHQSGGFLSESAE

SEQ ID NO: 2227 - DNA, 897 bp, Haemophilus influenzae
atggactatttagataaacttacccatttagcacaagtgcgtggagaaattaatattcgctgtgaatttcaaggcgaatggcaaatatctcatcaagaaaaggatgcaggaaaaggcatattccatcttattgaacaaggcgagtgctggcttacactaaatgaaaaacaatttcatttaaaagagggggatgttttttttcttcctcaaaatcaaccgcactctatgcattattcagcaaataaaagagcggatattcctacaaaaaaaagtcatcaaggattatttgagttacatcagattggacgaggtacaccagatttaaaaatgttctgcggtaatttttattatcaacaagatgcgcttcttacagcatcaatgcctgaatatttacatataaatttatgcgacacgccaattcatcctttagtacagctttttttacaagaagcgcaaaaaaatgatgcgggtacgaaatccgtcgttgatgcactttcaaatgtacttttaatttatattttacgccacgctattcaacaaaatttaattgaacaaggcatcttatttgccttgcaagataagcgattaaatactgcactgatcgcaatattacaacaacctcaaaatgattggcatattgaacaattagctgaacttgcaacaatgtctcgtgcaaactttattcgtatctttcaacaacatattggtatgtcgccaggacgttttctcacgaaagtgcggttacaatctgcggcgtttttattaaaacaatcacaacaatctgtgcttgccattgctttagaagtggggtatcaatcagaagcgcatttttgtaaagtttttaaaaattactaccaactttctccaagccaatacagaaaatctgtcagcctataa

SEQ ID NO: 2228 - protein, 298 aa, Haemophilus influenzae
MDYLDKLTHLAQVRGEINIRCEFQGEWQISHQEKDAGKGIFHLIEQGECWLTLNEKQFHLKEGDVFFLPQNQPHSMHYSANKRADIPTKKSHQGLFELHQIGRGTPDLKMFCGNFYYQQDALLTASMPEYLHINLCDTPIHPLVQLFLQEAQKNDAGTKSVVDALSNVLLIYILRHAIQQNLIEQGILFALQDKRLNTALIAILQQPQNDWHIEQLAELATMSRANFIRIFQQHIGMSPGRFLTKVRLQSAAFLLKQSQQSVLAIALEVGYQSEAHFCKVFKNYYQLSPSQYRKSVSL

SEQ ID NO: 2229 - DNA, 342 bp, Haemophilus influenzae
atgtttacagattggaaagaacacacatctcacgttaaaaaatcatttggtgaattgggtaaacaacaccctaaaatgttacaagcttaccaagcattaggcgcggcggcagcagagggcaatgtgcttgacgctaaaactcgtgaacttatcgcattagccgttgctgtaacaacgcgttgtgaaagctgtattagcgtacacgcagaagaagcggtaaaagctggtgcaagcgaagctgaagttgctgctgcattagcaacagctatcgcattaaatgcaggtgcagcttatacttattctttacgtgcattagaagcatatagcgtacagaaagcttaa

SEQ ID NO: 2230 - protein, 113 aa, Haemophilus influenzae
MFTDWKEHTSHVKKSFGELGKQHPKMLQAYQALGAAAAEGNVLDAKTRELIALAVAVTTRCESCISVHAEEAVKAGASEAEVAAALATAIALNAGAAYTYSLRALEAYSVQKA

SEQ ID NO: 2231 - DNA, 1296 bp, Haemophilus influenzae
ttgattggtcgcggcgtgcgttattttccatttgcgtttgaagataaacagccgaataaacgcaaatttgacaacgatatgcaacacgaattgcgtattttggaagaattgttttattacacgcacgatgagcaatcccgctatattacagaactaaaaaacgagttgcgaaaagacggttatttgcctgaaaaagacgatgataaggtattggcaacatttaaactcaaatctgaatttgctgataataaggattttagagagttgttaatttgggcgaataaaaaaatccccaatcccaatgccaaagccaataatgcagacagcctaaaagacaatccgccaacgcctccattccaagttcactgcaatcaattgttgcaggaaacgcaatttaaagctgatgcaaatgatgaaatagccttgcaacttggcacgcaaaataattttcctcgaaccataaaaatgagtgaaatggagcgacacatttttaataaagccttgcatatcaaaggaaaaaatagtcaatctttatttcatttcgatcgcttgcaaagcaaactcaacattcaaaatcgcaatgaattgcaaaataacttgttaaaagattggcaaattaaatttttgggattagggcaagataaacagattagcccagatgacaaacttgcaggctgcctaaaaatcttggaaaaggttgaaaaacgtctcaatgaaagtgatatgccatttatcggtacaaaagaatttacacctaaaaaattgtggggaatttttggcacaccaaaacaaaaatgggtcaaaagagatgatgtaaaaacgactattgccacgcaaaatgattggtatgtgatggataattttgctggaacgagtttggaagaagcgttaattcaatttatttcagagcgtttgggcaatttgaaatctcaatatgacgttcatttaatccgcaatgaagaagtgctcaaattgagaaattttgataacggcaaaggttttatgcccgactttattttattgctgaaagataaacaaaaatcttcttccaatggtgtggatggctttttgcattaccaaattttcattgaaccaaaaggcgggcatttagagaaaaatgattcgtggaaagcagcttttttagaggcaattacagcggaatacgggacggataagattctgcaaaaagatacaccgcattatcgtttgatcggtttgccgttttttactgacaatcagaaaaatgaacaatttacggagtcattccctttaggggaggcatcgcttgaaaaatag

SEQ ID NO: 2232 - protein, 431 aa, Haemophilus influenzae
MIGRGVRYFPFAFEDKQPNKRKFDNDMQHELRILEELFYYTHDEQSRYITELKNELRKDGYLPEKDDDKVLATFKLKSEFADNKDFRELLIWANKKIPNPNAKANNADSLKDNPPTPPFQVHCNQLLQETQFKADANDEIALQLGTQNNFPRTIKMSEMERHIFNKALHIKGKNSQSLFHFDRLQSKLNIQNRNELQNNLLKDWQIKFLGLGQDKQISPDDKLAGCLKILEKVEKRLNESDMPFIGTKEFTPKKLWGIFGTPKQKWVKRDDVKTTIATQNDWYVMDNFAGTSLEEALIQFISERLGNLKSQYDVHLIRNEEVLKLRNFDNGKGFMPDFILLLKDKQKSSSNGVDGFLHYQIFIEPKGGHLEKNDSWKAAFLEAITAEYGTDKILQKDTPHYRLIGLPFFTDNQKNEQFTESFPLGEASLEK

SEQ ID NO: 2233 - DNA, 1488 bp, Haemophilus influenzae
atggcgaataataaaactttgtttgattgggtggaagaccgcaaatcaaccctagaagaaatggagcagacggattttttcgcactgcctgaatttgtagaacgcaatttaaaatatccattttttgaatggcaaaagtccgcattagaaaactttttgatttttgaccgcacttcaaaattaaaggattttcccgacatcaaaaaccgccctacccatttactgttcaatatggcaacaggtgcaggcaaaacgatgatgatggcagcgttgattttgtattattttgaaaaagggtatcggcattttctgttttttgtgaatcaaaacaatatcgtggataaaacggaaaataattttattgacccaacgcacgcaaaatttttatttaccgagaagattttgcagggcgatacggtaattcctattcgcaaagtggaaacgtttagccaatattcagacggcattgaaattaaatttaccagcattcaaaaactgtataacgatattcacatccaacgagaaaaccaaaccacattggcggatttgaacgaattgaatcttgtgatgctgggcgatgaagcacaccatttaaacgcgcaaaccaaaggcaaaaaacaaggcgaattagagttagaaaaggaaatgaacgaccgcactagcaatgccgaaattgaactcaaaggctgggagcatatggttttgaaattcttactcaataaagatggcaatcctatccaaaatgtgctgttagaatttaccgccacgctacctgaaaatgctgacgtgcaacaaaaatacgctgataaaatcatcacaaaatttgggttaaaagaatttttgcaaaaaggttataccaaagaaatcaatttggtatccagtacgctggacaaaaaagagcgagtattgcacgctttattgtttgcttggtatcgccatcaaattgcgttgaaatatggcattgccaatttcaagcctgtgatgttgtttagaagtaagacgattgatgaatcaaaagcggattatttggcatttttaaattgggtagaaaatgtgcaagcggatgatttttcgtttttaacgacattttcaacaagcctgaacgatagcgataacgccaacgaacaaggcaaaacccgcaccgaacaagccctaaaatttatgcaggaaaatggctttgagtttgtgcatttggcaaattgggtaaaacaaaattatcaaaaacataatgtgattattaccaactccgagagcaacaaaaccaaaaaagaaaaaaccgacagcgaaacggaaaaattgctaaataatttggaagcagctgataatccgatccgcgctatttttacggtggacagattaaccgaaggttgggacgttctgaatttgtttgatattgtgcgtttatatgaagggcaaaacggctgccgctaccgtatcggaaaagcagttgattggtcgcggcgtgcgttattttccatttgcgtttga

SEQ ID NO: 2234 - protein, 495 aa, Haemophilus influenzae
MANNKTLFDWVEDRKSTLEEMEQTDFFALPEFVERNLKYPFFEWQKSALENFLIFDRTSKLKDFPDIKNRPTHLLFNMATGAGKTMMMAALILYYFEKGYRHFLFFVNQNNIVDKTENNFIDPTHAKFLFTEKILQGDTVIPIRKVETFSQYSDGIEIKFTSIQKLYNDIHIQRENQTTLADLNELNLVMLGDEAHHLNAQTKGKKQGELELEKEMNDRTSNAEIELKGWEHMVLKFLLNKDGNPIQNVLLEFTATLPENADVQQKYADKIITKFGLKEFLQKGYTKEINLVSSTLDKKERVLHALLFAWYRHQIALKYGIANFKPVMLFRSKTIDESKADYLAFLNWVENVQADDFSFLTTFSTSLNDSDNANEQGKTRTEQALKFMQENGFEFVHLANWVKQNYQKHNVIITNSESNKTKKEKTDSETEKLLNNLEAADNPIRAIFTVDRLTEGWDVLNLFDIVRLYEGQNGCRYRIGKAVDWSRRALFSICV

SEQ ID NO: 2235 - DNA, 2154 bp, Haemophilus influenzae
atgaagacagacattcaaaccgaattaacccaagccctactatcacacgaaaaagtatgggcgaacgaagaaaaaaccattttagccaaaaacattctgttggatttggtggaaaaaaccgacccgactattatcgggttgttattggggaatgatgagttaaaacgccatttctttgtggaagtgaatgatgttttggtgtttaaattgcaggattttcgttttttcttggacaaacacagaatcaataattcctacacaaaatacgccaatcgcattggcttgacggacggcaatcgctttttgaaagacagttcggatattgtgttggattttccgtttaaagattgtgtgttaaatggcggacaaagcaccgaagaaggcgaagaaatttattttaaacgcaataacagccagccagccagccagccagccagccagccagccagccagccagccagccagccagccagccaattatacactaaattaacccgaaaaagacaagaaatcttttttaatcaaacccttgcttttgatgaaattgatcgactttttgacgcaaaagcattctcaaaattctctcgctacaccgcagacggcaaacaagccgttggcgaaatcaaacgccattcagacggcacacccgccgaaaacctcattatcaaaggcaataatctgattgccctgcattcgcttgccaagcagtttaaaggcaaagttaagctgatttatattgacccaccttataacacgggcaacgatagctttaactataatgatagatttaatcattccacttggctgacttttatgaaaaatcggctggaaattgcgaaaacattgttggctgatgatggcgtgatttttgttcaatgtgatgacaatgaacaagcctatttgaaaattttaatggacgaagtttttggtcgtgaaaattttgttacaaccattcattgccaaatgtccacaacgcaaggaatgaaagttaaagcggcacaagatggaaatattgttaaaaatgctgaatatattatagttttttcaaaaaatggacataaaaatattgcaataaatcccttgtatgatttgcgttcagaatatgatgaacactattcgctatatttaaaaaacgatgggactattgggcaacttaaagaattatatgattatagatttccaaaagatttaaaaaatacaaccgcactttctttaaaagaagcatttaagaaaagtaatgaatttgccgagattgtgaaaacacatcttgccaagattgtagcaagcgataaagttactggatttgatttatccgttgaattagaaaatagcaaatggaaagaagttgagagaaatggaagaaaatatattcttacattagataaaaatggcaaagttcgccaattattaagactacaagattcttggggaaaaactgataattataataatgatgagggacttcgtaaaattcgtggtaattggtgggaaggtttttaccttgatatgggaaatgttggaaaagaagggagcgtagattttaaaaatggcaaaaaaggagagcgtttaatttcacaaattattaaaacagcaaccaacgaaagcgacatcgtcctagactaccatttaggcagtggcacaaccgccgccgtcgctcataaaatgaaccgccaatacatcggtattgaacaaatggattatattgaaacgcttgccgttgaacgcctgaaaaaagtgattgatggcgagcaaggcggtatatccaaagccctgaattggcaaggtggtggcgagtttgtttatgcagaacttgcaccatttaacgaaaccgcaaaacaacaaattttggcgtgcgaaaatttagacgacatcaaaacgctgtttaatgaattatacgaacgctatttcctaaaatacaacgtcagcgtggatgaattttgtcaaatgattaacgagcctgaatttcaatctttgccattagacgaacaaaaacaaatggtgcttgaaatgttggatttaaatcaaatgtatgtttcattatccgaaatggacgatgaacaatttgcagactgcctgaacgatgacgataaagtgttaagccgtgcgttctatcaatcagtaaaaaatcaagcggagaaaaaagatggcgaataa

SEQ ID NO: 2236 - protein, 717 aa, Haemophilus influenzae
MKTDIQTELTQALLSHEKVWANEEKTILAKNILLDLVEKTDPTIIGLLLGNDELKRHFFVEVNDVLVFKLQDFRFFLDKHRINNSYTKYANRIGLTDGNRFLKDSSDIVLDFPFKDCVLNGGQSTEEGEEIYFKRNNSQPASQPASQPASQPASQPASQLYTKLTRKRQEIFFNQTLAFDEIDRLFDAKAFSKFSRYTADGKQAVGEIKRHSDGTPAENLIIKGNNLIALHSLAKQFKGKVKLIYIDPPYNTGNDSFNYNDRFNHSTWLTFMKNRLEIAKTLLADDGVIFVQCDDNEQAYLKILMDEVFGRENFVTTIHCQMSTTQGMKVKAAQDGNIVKNAEYIIVFSKNGHKNIAINPLYDLRSEYDEHYSLYLKNDGTIGQLKELYDYRFPKDLKNTTALSLKEAFKKSNEFAEIVKTHLAKIVASDKVTGFDLSVELENSKWKEVERNGRKYILTLDKNGKVRQLLRLQDSWGKTDNYNNDEGLRKIRGNWWEGFYLDMGNVGKEGSVDFKNGKKGERLISQIIKTATNESDIVLDYHLGSGTTAAVAHKMNRQYIGIEQMDYIETLAVERLKKVIDGEQGGISKALNWQGGGEFVYAELAPFNETAKQQILACENLDDIKTLFNELYERYFLKYNVSVDEFCQMINEPEFQSLPLDEQKQMVLEMLDLNQMYVSLSEMDDEQFADCLNDDDKVLSRAFYQSVKNQAEKKDGE

SEQ ID NO: 2237 - DNA, 594 bp, Haemophilus influenzae
atgtttgaatatccacaaggctataaattgatcgctggcgttgatgaagttgggcgaggccctctagttggggcggttgtcacggcagccgtgattttagatcctcataatccaattgaaggattagctgattctaaaaaactttcagaaaaaaaacgtttagcccttgctgaagaaatcaaagaaaaagcccttgcttgggcattaggtcgagctgaagctgacgaaattgacgagataaatatcctgcaagcctccttgctggcaatgactcgagcggtaaaatctttaaaaattcaaccgcactttgtgttgattgatggtaataagatcccaaaagatttagatattccagctcaagccgtggtaaaaggcgatagccttgtggcagaaatcagtgccgcctctattttagcgaaagtggcacgagaccaagaaatggaagaattagacaagcaatatccagaatacgcttttgcccagcataaaggctatccgaccaaattacatttggaaaaattagctgaacttggtgcgttaccgcaacatcgtcgtagctttgccccagtgaaaaaagcactagaacagttttag

SEQ ID NO: 2238 - protein, 197 aa, Haemophilus influenzae
MFEYPQGYKLIAGVDEVGRGPLVGAVVTAAVILDPHNPIEGLADSKKLSEKKRLALAEEIKEKALAWALGRAEADEIDEINILQASLLAMTRAVKSLKIQPHFVLIDGNKIPKDLDIPAQAVVKGDSLVAEISAASILAKVARDQEMEELDKQYPEYAFAQHKGYPTKLHLEKLAELGALPQHRRSFAPVKKALEQF

SEQ ID NO: 2239 - DNA, 1173 bp, Haemophilus influenzae
atgaataaaacaaatccaaccattgctcttgttgcaggagaagtgtctggcgatattctcggggcgggattaatacgccagctcaaagcacattatcctaatgcgcgctttattggcattgcaggcccaagaatgttggctgaaggttgtgagactcttgttgatatggaagagctttcagttatgggcttggctgaaatattaaaacatcttcctcgcctgttgaaaattcgcaaaaatgtcattcaaactatgttgcaagaaaaacctgatgtttacatcggcattgatgcgcctgattttaatttggatgtagaacttaaactaaaagcaaacggaattaaaactattcattacgttagcccctctgtatgggcttggcgtcaaaatcgcatccataaaattgccaaagcgactcatcaagttctagcctttttgccttttgagaaagccttttacgataaatttaatgtgccttgccgttttattgggcacacaatggcagatgctattccgctcaaaccaaaccgtgccgaagcctgccaaacgttacagattgatcccgcacaacgctatttagcaatcttagttggaagccgaggttcagaagtggaatttctggctgagcctttcttaaaaaccgctttattattaaaagaacaattcccagatttacaattcctcgtgcctttagtgaacgaaaaacgacgaattcaatttgaaaccattaaagctaaaattacgccaaatctagacctgcatttaattgatggcaatgcacgacaagcaatgatcgcagctgatgcaacattgcttgcttcagggacagcagcacttgaagcaatgctttgtaaatcccccatggtagttggctatcgaatgaaaccactgacctatttcttagcaaaacgtttagtgaaaaccgattatatttctttaccaaacttgcttgcgaatgaaatgcttgttcctgaaatgattcaagaagaatgcacgccagaattgcttgctgaaaaactatctgcttatctttcagatgatgaaagttcggtaaaaaatcgccatgttttaattcagcacttcacggatttacaccaaaaaattcaatgcaatgccgataagcaagcggctcaagcagtcattgatttattagaaggaacaaaaaatgtttga

SEQ ID NO: 2240 - protein, 390 aa, Haemophilus influenzae
MNKTNPTIALVAGEVSGDILGAGLIRQLKAHYPNARFIGIAGPRMLAEGCETLVDMEELSVMGLAEILKHLPRLLKIRKNVIQTMLQEKPDVYIGIDAPDFNLDVELKLKANGIKTIHYVSPSVWAWRQNRIHKIAKATHQVLAFLPFEKAFYDKFNVPCRFIGHTMADAIPLKPNRAEACQTLQIDPAQRYLAILVGSRGSEVEFLAEPFLKTALLLKEQFPDLQFLVPLVNEKRRIQFETIKAKITPNLDLHLIDGNARQAMIAADATLLASGTAALEAMLCKSPMVVGYRMKPLTYFLAKRLVKTDYISLPNLLANEMLVPEMIQEECTPELLAEKLSAYLSDDESSVKNRHVLIQHFTDLHQKIQCNADKQAAQAVIDLLEGTKNV

SEQ ID NO: 2241 - DNA, 789 bp, Haemophilus influenzae
atgatccacccaagtgcaaaaattcatccaactgccctcattgaagaaggtgcggtaattggcgaagatgtttttattgggcctttctgtattattgagggtactgttgaaatcaaagctcgcactgtattgaaatctcacgttgtggtacgtggcgataccgtgattggcgaagataacgaaatttatcaattcactagtattggcgaagtaaaccaagatttgaaatacaaaggcgaagctacaaaaaccattattggtaatagcaataaaattcgtgaacacgtgacaatccatcgtggcacgattcaaggctgtggcataaccgctattggcaataacaatttattaatgattaatgttcacgttgcgcacgattgccaaattaaaaataactgtattctggcaaacaatgcaacgcttgcaggtcacgtagaattagatgatttcgtgattgttggcggtatgtcagcaattcaccaatttgtgattgttggcgcacatgttatgttaggcggcggttctatggtaagccaagatgtaccaccttatgttatggcgcaaggcaaccacgcccgtccatttggcgtaaacttagagggtttgaaacgtcgtggttttgataaaccaactatgcacgtaatccgtaacatttataaaatgctctaccgtagcggtaaaacacttgaagaagtgttaccagaaattgagcaaattgcggaaaccgattcagcgatcagtttttttgttgaatttttcaaacgttcaactcgcgggattattcgttaa

SEQ ID NO: 2242 - protein, 262 aa, Haemophilus influenzae
MIHPSAKIHPTALIEEGAVIGEDVFIGPFCIIEGTVEIKARTVLKSHVVVRGDTVIGEDNEIYQFTSIGEVNQDLKYKGEATKTIIGNSNKIREHVTIHRGTIQGCGITAIGNNNLLMINVHVAHDCQIKNNCILANNATLAGHVELDDFVIVGGMSAIHQFVIVGAHVMLGGGSMVSQDVPPYVMAQGNHARPFGVNLEGLKRRGFDKPTMHVIRNIYKMLYRSGKTLEEVLPEIEQIAETDSAISFFVEFFKRSTRGIIR

SEQ ID NO: 2243 - DNA, 405 bp, Haemophilus influenzae
atgactttattaccacatcgctatccatttttattagtggatcgcgtattggattttaaagaaggcgaatggttaaaagcgattaaaaatatcagcgtcaatgagccttgtttcacaggccacttcccaggcgaacccattttaccgggcgttttaattttagaagctttggcacaagcaatgggcattttagcctttaaaactcacgaattaaaaggcggcgaactattctactttgcaggtattgatgaagcccgctttaaacgcccagtattaccgggagatcaaatggaattaaacgttcaagtgattaaaaaacgccgtggtattactgcatttactggcgttgccaccgtaaacggagaaatcgcttgtgaagcaaaactaatgtgtgctcgtcgttaa

SEQ ID NO: 2244 - protein, 134 aa, Haemophilus influenzae
MTLLPHRYPFLLVDRVLDFKEGEWLKAIKNISVNEPCFTGHFPGEPILPGVLILEALAQAMGILAFKTHELKGGELFYFAGIDEARFKRPVLPGDQMELNVQVIKKRRGITAFTGVATVNGEIACEAKLMCARR

SEQ ID NO: 2245 - DNA, 1563 bp, Haemophilus influenzae
atgatgaacacgaaaaaaacaagccaaattttgcccgcactttttgcagtgatttgtgccgcattcgcgggttattttattttaatcggttctggaatgtttacagaaccaagtgtggctctcattctgcttgcgacaataactattctcttattaagcagcagtaaaaaatccttctattttattttgctacctcttacgttactgcatgctttttatacgcctacagggctaaattttggccctccaagctaccaatatatcgcctcgcttttcgcgacagatatattagaaacgaaggaatttctattgcaaatcccagtgagtagttacttaattgctttcgccattcctattttgatttttcttcagtacaaaagtgcggtgaaatttggcataaaattttatcgtaataaaacatttattgccttggcgacattgctttttgcttacaacatgccgcttgctgaaccgctcaaagaaacagtaagttccacattaaaaattgtagatgaagtacaaaaactaaaacaaatctctcaatctgataactggggaaaatcaacattagaaaattcacgctatgatgattatgtaattgtactcggagaaagtgcacggaaagattaccaccatgcctacggttatccaatagaaaacaccccctttatgtctaacgctaaaggcacgttgattgatggttttcgttcagcaggaacaaataccgtcgcctcacttcgtttaatgctaacctttccagacaaagaaaaatgggaacccaattacagtttgagtttagtagatctcatcaaatctgcaggcgtgaaaacttattggctttctaatcaaggtatgctcggtaaattcgatacgcccgtttcatccctcgcttcaaaatctgatgaaacctttttcttgaaaaaaggcggaagctttaattcgactaactttagtgactttgatttattacccaaattcgcccaagtattagaaaattctgttcaaggaaaacgttttattgtgttgcatatttatggttcacacccaatggcttgcgatcgtatcgaagattatccaaaaatctttgatgataaagatcttaattcgaaatatggttatttaaattgctatgtttcatctattaagaaaactgacgaatttttaaaacgtgtatatgatcagcttgaagaaaacgtgaagaaaaatcaccgcactttttcaatgatttatttctcagatcacggtttgtgccaccaacaagatgaaaaaaacaatatacttttgttcaatcaaaactgtttcagccgagagcaccataatattccgctattcaaaatttcatcagatgatatggaacgcaaagaatataaggtgtttaaatcgggtttgaacttcttagaaggaatcgcaaattggataggaattaaaaatcctcaattaacgcaaacagaagatttattttctaacgaagcggataaaaatgactttggattgcaaaaacgaattgatgaaaaatatcgtaaagatgacgatccagccattgatattcgtcctaaacactag

SEQ ID NO: 2246 - protein, 520 aa, Haemophilus influenzae
MMNTKKTSQILPALFAVICAAFAGYFILIGSGMFTEPSVALILLATITILLLSSSKKSFYFILLPLTLLHAFYTPTGLNFGPPSYQYIASLFATDILETKEFLLQIPVSSYLIAFAIPILIFLQYKSAVKFGIKFYRNKTFIALATLLFAYNMPLAEPLKETVSSTLKIVDEVQKLKQISQSDNWGKSTLENSRYDDYVIVLGESARKDYHHAYGYPIENTPFMSNAKGTLIDGFRSAGTNTVASLRLMLTFPDKEKWEPNYSLSLVDLIKSAGVKTYWLSNQGMLGKFDTPVSSLASKSDETFFLKKGGSFNSTNFSDFDLLPKFAQVLENSVQGKRFIVLHIYGSHPMACDRIEDYPKIFDDKDLNSKYGYLNCYVSSIKKTDEFLKRVYDQLEENVKKNHRTFSMIYFSDHGLCHQQDEKNNILLFNQNCFSREHHNIPLFKISSDDMERKEYKVFKSGLNFLEGIANWIGIKNPQLTQTEDLFSNEADKNDFGLQKRIDEKYRKDDDPAIDIRPKH

SEQ ID NO: 2247 - DNA, 714 bp, Haemophilus influenzae
atgagccaaccaatttataaacgtattttattgaaattaagcggtgaagcattacaaggagaagatggtcttggtatcgatcctgcgattctcgatcgtatggctgttgaaattaaagaattagtggagatgggcgtggaagttggtgtcgttctcggtggcggcaacttattccgtggtgcaaaactagcaaaagcggggatgaatcgcgtggtgggcgatcatatgggaatgcttgctacggtgatgaatggtttggcaatgcgtgattctttattccgtgctgatgtgaacgcaaaattaatgtccgctttccaattaaatggtatttgcgatacttataactggtctgaagcaatcaaaatgttacgcgaaaaacgcgtagtcattttctctgcgggaacgggaaatccattctttacaactgattctaccgcttgtttgcgtggtattgaaattgaagctgatgttgtgttgaaagcgactaaagttgatggtgtgtatgattgtgatcctgcgaaaaatcctgatgcaaaactttataaaaatttaagttatgcagaagtgatcgataaagaattaaaagtgatggacttatcggcgtttactttagctcgcgatcatggcatgccaattagagtgttcaatatgggtaaacctggagcattacgtcaagtagtgactggtactgaagaaggcaccactatttgttag

SEQ ID NO: 2248 - protein, 237 aa, Haemophilus influenzae
MSQPIYKRILLKLSGEALQGEDGLGIDPAILDRMAVEIKELVEMGVEVGVVLGGGNLFRGAKLAKAGMNRVVGDHMGMLATVMNGLAMRDSLFRADVNAKLMSAFQLNGICDTYNWSEAIKMLREKRVVIFSAGTGNPFFTTDSTACLRGIEIEADVVLKATKVDGVYDCDPAKNPDAKLYKNLSYAEVIDKELKVMDLSAFTLARDHGMPIRVFNMGKPGALRQVVTGTEEGTTIC

SEQ ID NO: 2249 - DNA, 966 bp, Haemophilus influenzae
atgacgttagattatccagttccatttcatacgcctaatctagtgtgggattataccattgcgatctacttgtttttattggggatctcatctggtgcggtacagttagcaattgcctataaacgcagtaataaactagaaaatctaagccaaaactggattattcgatctggggtaattttagggtctgtaccaacattaattggtttaacgctattaattttccacttgactcgaccttggacattctggaaattgatgtttaactatcaattcaactccgtaatgtcgatgggggtcatgctattccaaatctatatgttatttttagtaatttggggtgtagtgattttcaaaaaagaaatcgaagcattaattaatcgctttataccaaaactgcaatttgtgatgaaactcatcggtattgcagaacgtattgtaagtccagtcgaagttattcttttcatattggctgctgtgcttggagcatacacagggttcttactttctgcattgattagctatccaatgttaaataaccccgtattacccgcattattcttagcttctggcacatcatctggtattgctgcaaccttcttaattatcttaattgcaggaaaactaaaaggtgattctcacgaatcgcacttcatccacagatttgaagtgccaattatggtgacagaacttggtttgattgtgtgtttctttgttggattacattttggtggcggacaaaaaacagttgcgttacataatgccttatctggtttttggggagtggtattctgggttggagtattgattattggtatcttgatcccattaatcgccaatatgtttgttaatgaccgtttaaaatacaatcgtaactttattatcttggtgtcaatttttgacttaattggggtattttgtttacgtttctttattttatatgcgggacaactcactgtagcttaa

SEQ ID NO: 2250 - protein, 321 aa, Haemophilus influenzae
MTLDYPVPFHTPNLVWDYTIAIYLFLLGISSGAVQLAIAYKRSNKLENLSQNWIIRSGVILGSVPTLIGLTLLIFHLTRPWTFWKLMFNYQFNSVMSMGVMLFQIYMLFLVIWGVVIFKKEIEALINRFIPKLQFVMKLIGIAERIVSPVEVILFILAAVLGAYTGFLLSALISYPMLNNPVLPALFLASGTSSGIAATFLIILIAGKLKGDSHESHFIHRFEVPIMVTELGLIVCFFVGLHFGGGQKTVALHNALSGFWGVVFWVGVLIIGILIPLIANMFVNDRLKYNRNFIILVSIFDLIGVFCLRFFILYAGQLTVA

SEQ ID NO: 2251 - DNA, 678 bp, Haemophilus influenzae
atgacagtctgctcacgccgaaactttgtttctggcatgggggctgtgatccttatgacgggaacatctttacctgcttttgcaaaagaagacaaggcggataaacctaaacgttacgcaatgatacatgatgaaaatgcgtgtatcggttgtacagcctgtatggactcatgtcgtgatgtaaaccaagtgccagaaggcgtttctcgcttagagattctacgtagtgaaccttatggggaatttccaaatcaagaatacgagttctttcgtcaatcttgccaacattgtacaaatgcaccttgtgtagcagtttgtccaactggtgcatcttttattgataaagagactggcattgtagatgtacataaagatttatgcataggctgccaatactgtatagcagtttgcccatatcgtgtacgttttattcatccaatacatcgtaccgcagataaatgtaacttctgccgcgatacaaatttagccaatggtaaacaacctgcttgcgtagaggcttgcccaaccaaagcattaacttttggggatatgaatgatccaacaagtgcagtttcacgtaaagtgaaagaaaaaccggtttatcgcactaaagtggaattaggtacacaaccaaacttatatcacattccattccaacatggggagcctagaagatga

SEQ ID NO: 2252 - protein, 225 aa, Haemophilus influenzae
MTVCSRRNFVSGMGAVILMTGTSLPAFAKEDKADKPKRYAMIHDENACIGCTACMDSCRDVNQVPEGVSRLEILRSEPYGEFPNQEYEFFRQSCQHCTNAPCVAVCPTGASFIDKETGIVDVHKDLCIGCQYCIAVCPYRVRFIHPIHRTADKCNFCRDTNLANGKQPACVEACPTKALTFGDMNDPTSAVSRKVKEKPVYRTKVELGTQPNLYHIPFQHGEPRR

SEQ ID NO: 2253 - DNA, 651 bp, Haemophilus influenzae
atgaatttaacttctttaatcaacaaatctgcaaaagcgttagcgttaattgtggcatttgtagcagcgccatttttggctcatgcggatgatgcacaaaaacctgcggatcatgttacttatgaaccgcaattagataaccaacgcgatcctaatcaatattgtgctaaatgccataaattcgacaaaatagataaaaaccaaacgctagatcagtctggtggcgaactccactttggtaaatttcacggtgcacatttagataagaaaaatccaaataacggtaaagctattacttgtgtaagctgtcacggcaatatttccgaaaatcatcgtcgcggtgctaaagatgttatgcgttttgaaggagatattttcggtaataaaaaaccgatgtattccgttcaagaacaaaaccaagtttgttttgcttgccatcaacctgacaaacttcgtgaaaaattatgggctcatgatgtacacgcaatgaaattgccttgcgcaagttgccatacgcttcaccctaaagaagatgcaatgaaggggattcaaccaaaacaacgcgttaaactttgtgtagattgtcatggcgaacaacaaaaacgtaaagctgaacaagataaactaatcgaacaaaaggataaactatga

SEQ ID NO: 2254 - protein, 216 aa, Haemophilus influenzae
MNLTSLINKSAKALALIVAFVAAPFLAHADDAQKPADHVTYEPQLDNQRDPNQYCAKCHKFDKIDKNQTLDQSGGELHFGKFHGAHLDKKNPNNGKAITCVSCHGNISENHRRGAKDVMRFEGDIFGNKKPMYSVQEQNQVCFACHQPDKLREKLWAHDVHAMKLPCASCHTLHPKEDAMKGIQPKQRVKLCVDCHGEQQKRKAEQDKLIEQKDKL

SEQ ID NO: 2255 - DNA, 1527 bp, Haemophilus influenzae
gtgaacgcattcaaaaaaagccttattgtggcagcgtctttcgcgagtttaagcttgtttaactcagccactgctgagcttgtatataagccattagaacaacctgttgaacccgcaaaacctgatttgaaaattgaatccgtaaatgaaaaatttgcagaaaaatatccaaatcaatataacagctggcgttcaacagcaaacggtaatggcgaaaaaattatttatgctgatgaagaagatccgcgcctaatcgtactttggggaggttatgcgtttgcaaaagaatataacgcaccacgcggtcacttttatgcggtaacagatgtgcgtaatattttacgtacaggtgcgccaaaaactgcaaatgatggccctcaagctatggcatgttggacatgtaaaggccctgatgttccacgtttaatcgcggaatggggggaaaaagattatttcaatgcgaaatgggcaaaaggtggacctgaaatcgtgaactcaattggttgtgctgactgtcacgatacaacctctaaagattttgcagaaggcaaaccagcattacgtattgctcgtccacacgtattacgcgcacttgacgctttagaaaaagccactgcagcaaaagataaagcggaaggtcgcccacataacaatttaagcttcaactcggcagcacgtactgaaaaacgcgctgaaatctgtgcaaactgccacgtagaatactacttcgctggcgacataaagcaagtaacctttccttgggataatggtcaaaccgcagatgatattgaaaaatattatgatgatattggtttcactgactggactcactcactttctaaagcaccaatgttaaaagcacaacaccctgactttgaaatttggtctttaggtatgcacggtaaaaatggggtaacttgtgtagattgccatatgccgaaagtacaaggcgcagacggtaaagtttatactgaccaccaaatccaaaatccattcgatgcatttgaccacacttgtgcaaattgtcacgatcaaagcaaagaaaaattacgcgatattgttacttcacgtaaaaaagaagtgaaagatgtaatgggtcgtttagaagaccaagttgtcaaagctcactttgaagcaaaagaggcttgggacgcaggtgcaactaaaaaagaaatggaagcagcattaatggatattcgtcatgctcaatggcgttgggattacactgctgcaagccatggtggtcatatgcatgcgcctgaagtagtacttcgtgtattagcttctggcttagataaagtagcagacgcacgtactaaacttgctgtaatcttaactaaacacggtgtgaaaactccagttcaaatcccagatatttcaactgctgataaagcgtggaaagtaatgggtattgatattgaaaaagaacgtaaagcgaaagaagaattcttaaaaactgtggtaccacaatgggaacaacaagctagagaaaaaggcttattagttgatccaccagcacaaaaataa

SEQ ID NO: 2256 - protein, 508 aa, Haemophilus influenzae
MNAFKKSLIVAASFASLSLFNSATAELVYKPLEQPVEPAKPDLKIESVNEKFAEKYPNQYNSWRSTANGNGEKIIYADEEDPRLIVLWGGYAFAKEYNAPRGHFYAVTDVRNILRTGAPKTANDGPQAMACWTCKGPDVPRLIAEWGEKDYFNAKWAKGGPEIVNSIGCADCHDTTSKDFAEGKPALRIARPHVLRALDALEKATAAKDKAEGRPHNNLSFNSAARTEKRAEICANCHVEYYFAGDIKQVTFPWDNGQTADDIEKYYDDIGFTDWTHSLSKAPMLKAQHPDFEIWSLGMHGKNGVTCVDCHMPKVQGADGKVYTDHQIQNPFDAFDHTCANCHDQSKEKLRDIVTSRKKEVKDVMGRLEDQVVKAHFEAKEAWDAGATKKEMEAALMDIRHAQWRWDYTAASHGGHMHAPEVVLRVLASGLDKVADARTKLAVILTKHGVKTPVQIPDISTADKAWKVMGIDIEKERKAKEEFLKTVVPQWEQQAREKGLLVDPPAQK

SEQ ID NO: 2257 - DNA, 3912 bp, Haemophilus influenzae
atgaaaaacagctcggtaaaacacacattaactcccttacaacaatctcttttttctcaattaaatgacatcatgctggtggatcaacgtcgcttatccgcccgcattcatggtattggaaaaattaaaagccaagaggctcaacaagccgttgccgctgaaatccaacagcaaattgaacaagctagattacgtgtagaacaacggaaaagtgcggtacaaaatccgattgtttttccagagagtttgcccgttagccaacgcaaagtcgaaattcaaaaactgctttctgaacatcaggtcatcgtggtggcaggggaaactggttcaggtaaaaccacccaattgccgaaaatgtgtttggaattaggtttcggcaatcttggcatgattggtcatacccagccacgccgtattgccgctcgttcagtggcggtgcgtattgcggaagaactggaaacagaacttggcgatttagtggggtataaagtccgttttaacgatcaaatcagcgataacacccaaatcaaattgatgactgacgggattctgctagcagaaattcaaaacgatcgttttctcaatcaatattcttgtttgattatcgatgaagcccacgaacgtagcctaaataacgattttattctcggttatctgaaacagttgttgccacgtcgtcgtgatttaaaacttattatcacttctgcaaccattgatgtggaacgcttttctaaacactttaacaatgcgccgattattgaagtctcaggcagaacctatcctgttgaagtgcgttatcgtcccgtagtggaagaagacgatcaagatcagctacaaggtattcttaatgcggtggatgaattgcaagcagaaggtcgaggcgatattttgatctttatgaacggtgaacgggaaattcgtgatactgccgaagccttgcaaaagcaaaatctaaaacacacggaaattctaccgctctttgctcgattgtctgcgcaagaacaaaataaaattttccatccaagcggtttaaatcgcattgtattagcgaccaacgtcgcagaaacctcattgaccgtaccgggcattaaatatgtgattgacccaggtacagcgcgcatttcccgttatagttatcgcaccaaagtacaacgtttaccgattgaacctatttcacaggcatctgctaatcagcgtaaaggtcgatgtggtcgtgtaagtgaaggggtttgtattcgtttatattcggaagaggattttaattctcgtccagagtttaccgatcctgaaattctacgcaccaatttagcctccgttattttgcaaatgacggcattgggtttggatgatattgaagcattcccttttgtagatgcgccagataaacgccatattcaagatgggataaaactgttggaagaattgggcgcgtttgaaatggttcgcaccaaagcgggtgaaaaacgcctattaactagagttggtcgccaactcgctcaacttccagtcgatccgcgccttgccaaaatgatcctaagtgcggtcaattttggctgcgtttatgaaatgatgatcatcgtctctgcgttatccattcaagatccgcgcgaacgaccacaagaaaaacagcaagcttccgatgaaaaacatcgtcgttttaccgataaaaaatcagatttcttggctttcctcaatctttggcgttatctacaagaacaacaaaaagcattgagtaaaaaccaattccgtcgtcagtgccaaaaggatttcttaaattatttacgcattcgtgaatggcaggatatttatcatcaaattcgtttaaccgtgcgtgaaatgggcttaccgattaattctgaaaaagcagaatatcagcaaattcataccgcacttttaagcggtttgctttctcatatcggtttaaaagaagcggagaaacaacaatatcttggcgcacgtaatgcccattttgcaattttccccaattctgtgcttttcaaaaaacaaccgaaatgggtgatggcggcagagttagtggaaacctccaaactttgggggcgcatggtggcagaaatcgagccagaatggattgagccacttgccgagcatttaataaaaaaatcctattccgaacccctttggtctaaatctcgtggggcggtgattgcagatgagaaagtcacactttacggtgtgccgattgtggctgcgcgaccaatgaattacggtgctattgatccaacggtaagccgtgagatttttattcaatctgccttggtggaagggggttggaataccaagcataaattcttcaaagaaaatcaaaggctcgttcaagaagtagaagaattggaacacaaaagccgccgccgcgatattttggtggatgatcgcacgctttttgaattttacgatcagcgtattggcacagaagttgtctctcaaaaacattttgatacctggtggaaaaaggcacagcaaaaagatcctgaattgcttaattttgaacgttcatttttgatcaatgatgatgcggaacaagtgagcaagctggatttcccgaatttctggcatcaaggtaatttaaaactcaaattgacttatcaatttgaaccaggtaccgatgcggacggcgtgacagtacatattccattgccattgctcaaccaagtggaaatgacaggctttgactggcaaattccaggcttgcgtgaagagttggtgattgcgctgattaaatcgctgccgaaatcttatcgccgtaacttcgtgcctgcacctaattatgctcaagcttttttaagtcgtgcggtgccgttggaaaagccattattagatacgctgatttatgaattgcgtcgtatgactggcgtcaccgtagaagcggaacattggaattggaaacaaattccaagccatctgaaaatgacgttccgtgtggtggatgaaaacggtaagaaaatcgcagaatccatgaatttggatgagctgaaattcaacttaaaagatcgtgtgcaggaaagtatttctgctgtggcagatgatggcattgagcaaagtgggctgcatatttggagttttgcagatttaccacaatgttacgaacaaaaacaacgaggtttcagcgttaaagcgttccctgctattgtagatgaaaaagatgccgtaggtatcaaactgtttgaaacagaatttgagcaatcggtggcaatgcaacaaggtttacgtcgtttgttattgctcaatgtgccgtcaccgattaaatatctgcatgaaaaattgccgaataaggccaaattggggctgtattttactccgttcggtcgcgtattggatttgatcgatgactgtattgcttgtgccgtagataagctaattgccgattttggcggttttgtatgggatgaagcaggttttgaaaaattgcgtgatttcgttcgagaaaaccttaacgaagtgaccgtggatattgcgcagaaagtggagcagattcttactctcacttaccaacttaaccaacgccttaaaggcaaaatggatttcacgatggcatttgcattatccgacatcaaatcgcaacttgcaagtttggtgtatcaaggttttgtgcaaaagagcggttatgatcgcctaccagatttacaacgttatctgcaagccattgataaacgtattgataagttggctcaagatgtaaaccgtgatcgtgccgcgatgctacgcgtggaacaagtacaacaggcttaccaacaattactggctaaactgccaaaatctaaaccgatttctgatgaaattgcggaaattcgctatatgattgaggaattgcgcgtaagtttatttgcccagcagttggggacgaagtatcaaatatcagataaaagaatagcaaatattattagtcaatactaa

SEQ ID NO: 2258 - protein, 1303 aa, Haemophilus influenzae
MKNSSVKHTLTPLQQSLFSQLNDIMLVDQRRLSARIHGIGKIKSQEAQQAVAAEIQQQIEQARLRVEQRKSAVQNPIVFPESLPVSQRKVEIQKLLSEHQVIVVAGETGSGKTTQLPKMCLELGFGNLGMIGHTQPRRIAARSVAVRIAEELETELGDLVGYKVRFNDQISDNTQIKLMTDGILLAEIQNDRFLNQYSCLIIDEAHERSLNNDFILGYLKQLLPRRRDLKLIITSATIDVERFSKHFNNAPIIEVSGRTYPVEVRYRPVVEEDDQDQLQGILNAVDELQAEGRGDILIFMNGEREIRDTAEALQKQNLKHTEILPLFARLSAQEQNKIFHPSGLNRIVLATNVAETSLTVPGIKYVIDPGTARISRYSYRTKVQRLPIEPISQASANQRKGRCGRVSEGVCIRLYSEEDFNSRPEFTDPEILRTNLASVILQMTALGLDDIEAFPFVDAPDKRHIQDGIKLLEELGAFEMVRTKAGEKRLLTRVGRQLAQLPVDPRLAKMILSAVNFGCVYEMMIIVSALSIQDPRERPQEKQQASDEKHRRFTDKKSDFLAFLNLWRYLQEQQKALSKNQFRRQCQKDFLNYLRIREWQDIYHQIRLTVREMGLPINSEKAEYQQIHTALLSGLLSHIGLKEAEKQQYLGARNAHFAIFPNSVLFKKQPKWVMAAELVETSKLWGRMVAEIEPEWIEPLAEHLIKKSYSEPLWSKSRGAVIADEKVTLYGVPIVAARPMNYGAIDPTVSREIFIQSALVEGGWNTKHKFFKENQRLVQEVEELEHKSRRRDILVDDRTLFEFYDQRIGTEVVSQKHFDTWWKKAQQKDPELLNFERSFLINDDAEQVSKLDFPNFWHQGNLKLKLTYQFEPGTDADGVTVHIPLPLLNQVEMTGFDWQIPGLREELVIALIKSLPKSYRRNFVPAPNYAQAFLSRAVPLEKPLLDTLIYELRRMTGVTVEAEHWNWKQIPSHLKMTFRVVDENGKKIAESMNLDELKFNLKDRVQESISAVADDGIEQSGLHIWSFADLPQCYEQKQRGFSVKAFPAIVDEKDAVGIKLFETEFEQSVAMQQGLRRLLLLNVPSPIKYLHEKLPNKAKLGLYFTPFGRVLDLIDDCIACAVDKLIADFGGFVWDEAGFEKLRDFVRENLNEVTVDIAQKVEQILTLTYQLNQRLKGKMDFTMAFALSDIKSQLASLVYQGFVQKSGYDRLPDLQRYLQAIDKRIDKLAQDVNRDRAAMLRVEQVQQAYQQLLAKLPKSKPISDEIAEIRYMIEELRVSLFAQQLGTKYQISDKRIANIISQY

SEQ ID NO: 2259 - DNA, 375 bp, Haemophilus influenzae
atgaaaaacaaataccttactcttgttgctttaagcggattcttctgtgtcgcactaggcgcatttgcagctcatggcttaagccatatattagaagccaaagcattatcatggattgatacggggttagaatatcaaatgttccataccattgcagtacttgccgttgcattatctgctttacgtgacaacaaattcgcccgattatctatgtcttcttggttaattggaatcttattatttagtggaagtttatacgcacttgctttcgaagcaagcaatgtaattgtatggattacgcctattggcggcactttatttttaatcggatggattagcttagcttacggaagtttcaaaagtaaatcgctatga

SEQ ID NO: 2260 - protein, 124 aa, Haemophilus influenzae
MKNKYLTLVALSGFFCVALGAFAAHGLSHILEAKALSWIDTGLEYQMFHTIAVLAVALSALRDNKFARLSMSSWLIGILLFSGSLYALAFEASNVIVWITPIGGTLFLIGWISLAYGSFKSKSL

SEQ ID NO: 2261 - DNA, 453 bp, Haemophilus influenzae
atgacattacaattcaatactattgctctattactagttatactgcttattcttggcgtattaagcaacaatagcacaattaccatctctgccgctgtattacttattatgcagcaaacttttttatcttctcacattcctttgctcgaaaaatatggcgttaaaattggtatcattattttaaccattggggttttaagccccttagtttcagggaaaattcagttgcctgatttatcaggttttcttagttggaaaatggctctttctattgcagttggagtgcttgtggcatggcttgctggcaaaggtgtgcctttaatgggcgaacaaccgattttagtcactggcttgcttatcggcacaattattggtgtagcatttttgggtggaattcctgttggtccccttattgctgcagggatattagctttatttttagggaaaatttaa

SEQ ID NO: 2262 - protein, 150 aa, Haemophilus influenzae
MTLQFNTIALLLVILLILGVLSNNSTITISAAVLLIMQQTFLSSHIPLLEKYGVKIGIIILTIGVLSPLVSGKIQLPDLSGFLSWKMALSIAVGVLVAWLAGKGVPLMGEQPILVTGLLIGTIIGVAFLGGIPVGPLIAAGILALFLGKI

SEQ ID NO: 2263 - DNA, 99 bp, Haemophilus influenzae
atgttatatgcgatttgggtagtgggtgtattgtttgcaatttgggctagtgcgaaatgcaccatcaataaagaaaaaaaaggtaaatttgaagaataa

SEQ ID NO: 2264 - protein, 32 aa, Haemophilus influenzae
MLYAIWVVGVLFAIWASAKCTINKEKKGKFEE

SEQ ID NO: 2265 - DNA, 1137 bp, Haemophilus influenzae
atgattgattatgaatttctacgttttatttggtgggtgttagttattgtattattgattggcttctctgtaactgatggatttgatatgggcgtgaccgcacttttacctgtaacaggtaaaaaagaagtggaacgccgcattatgatcaacactattgctccccattgggatggtaaccaagtttggttattaactgcaggtggtgcaatatttgcagcttggccaattgtatatgcagtatctttctcaggtttttacattgcattagtattagtcttggcagcgttattcttacgtccattgggttttgaatatcgtgcaaaaattgataatccaacttggcgttctgtttgggactggggattattcgcaggtggttttgtaccagcattagtatttggcgtggcttttggtaatttattacaaggcgttccattccattttaacgaattaactcaagtgacttatacaggttcattttttgagctattaaatccattcgcattattatgtggtgttattagcttatcaatgcttgtcactcacggcgcaaactggttacaaatgaaaaccactgaagtcttacgtgatcgggctcgttcagtaagtcaaattggttctattgtgactttgattgcattcgtattagctggcgtatggttatattctaaagatggttatgtagttactagcactatcgatcatttcgctccatcgtctccaatgaataaagaagttgctgtagaaactggcgcgtggtttagaaatttcaatgaaatgccaattctttggattttccctgcgttagctgtagttgctgcattattaaatgctgcattttctaaagctaatcgttgtggttttgcatttttcttctctgcattaacaatggctggtgtgattattactgcagcagtatcaatgttcccatttgtgatgccttcaagttcacatcctgaacaaagtttattaatgtgggattcgacttcaagtgaattaacattaacattaatgctgatttttgcagttgtttttgtggtcattgctttagcttatactatttggtcttactcaaaaatgtttggtcgtttagatgctaatttcattgataaaaataaacactcattatactaa

SEQ ID NO: 2266 - protein, 378 aa, Haemophilus influenzae
MIDYEFLRFIWWVLVIVLLIGFSVTDGFDMGVTALLPVTGKKEVERRIMINTIAPHWDGNQVWLLTAGGAIFAAWPIVYAVSFSGFYIALVLVLAALFLRPLGFEYRAKIDNPTWRSVWDWGLFAGGFVPALVFGVAFGNLLQGVPFHFNELTQVTYTGSFFELLNPFALLCGVISLSMLVTHGANWLQMKTTEVLRDRARSVSQIGSIVTLIAFVLAGVWLYSKDGYVVTSTIDHFAPSSPMNKEVAVETGAWFRNFNEMPILWIFPALAVVAALLNAAFSKANRCGFAFFFSALTMAGVIITAAVSMFPFVMPSSSHPEQSLLMWDSTSSELTLTLMLIFAVVFVVIALAYTIWSYSKMFGRLDANFIDKNKHSLY

SEQ ID NO: 2267 - DNA, 1566 bp, Haemophilus influenzae
atgttagacgttgttgatctttctcgcttgcagtttgctttaactgcgttgtatcacttcattttcgtgccgctaacattgggtttatcctttattcttgtaattatggaaactatttatgtggcgacaggtaaagaagtttataaagatatgacaaaattttggggaaagttatttggtattaactttgcccttggggtgaccaccggtattattatggaattccaatttggtactaactggtcttattattctcattacgtaggggatatttttggtgcgccacttgctattgaagcgttacttgccttcttcttagaatctacttttgtggggttattcttcttcggttgggatcgtttatcaaaaggaaaacacttattagcaacttattgtgtggctttcggttctaatttatctgctatgtggattttggttgcaaatggctggatgcaagcaccaacaggttcagaatttaattttgaaactgtacgtatggaaatgactaacttcttagatctttggttaaaccctgttgcacaaagtaaattcttacatactctttctgcaggttatgtgacaggcgcattttttgttttagccattagctcatactttttactaaaaggtcgtgattttgaatttgcaaaacgttctttctccgtagctgctacttttggatttatcgcctctatttcagtgctaattcttggtgatgaatctggttatgatattggtaaagcacaaccagtaaaattagccgcaatggaagctgaatttgaaactcacccagcacctgctccattccttccagtagcaattccaaatacggctgaaatgaaaaatgattttgcgattgaaattccttatcttggcggtgtaatagcaactcgttcaattgataaagaaattataggtctaaaagatcttcaagcattaaatgaaactcgtgtacgtagtggtatccgtgcttatgaattatttactcaactacgcgctgagaaaaaagcaaatggtcaagtaaatgaagaaaccaaagcacaatttaatgaagttaaaaaagatcttggtttcggtttattattaaaacgctatacaaacaatgttgttgatgcgacagaagaacaaattaaacaagccgctcgtgatactattccaaatgtaggccctaatttttgggcatttcgtgcaatgattgcctctggtggtttaattgctttacttacattcggcgcatttgttcaaaatttacgtaataaagtcactcaaattccattattgttaaaagttcttttatggggcttgccattaccttggattgccattgagtgcggttggttcttagcagaatatggtcgtcagccttgggctatttacgagatcttacctgttggcgtatccgcttctaatttaagtacaggcgatttatggttctccattggtttaatttgtgcgctttatcttgcgttcattattgttgagatgtatttgatgtttaaatatgcgcgtttgggtccaagtgcgttaaaaaccggcaaatactactttgaacaatcagctaaataa

SEQ ID NO: 2268 - protein, 521 aa, Haemophilus influenzae
MLDVVDLSRLQFALTALYHFIFVPLTLGLSFILVIMETIYVATGKEVYKDMTKFWGKLFGINFALGVTTGIIMEFQFGTNWSYYSHYVGDIFGAPLAIEALLAFFLESTFVGLFFFGWDRLSKGKHLLATYCVAFGSNLSAMWILVANGWMQAPTGSEFNFETVRMEMTNFLDLWLNPVAQSKFLHTLSAGYVTGAFFVLAISSYFLLKGRDFEFAKRSFSVAATFGFIASISVLILGDESGYDIGKAQPVKLAAMEAEFETHPAPAPFLPVAIPNTAEMKNDFAIEIPYLGGVIATRSIDKEIIGLKDLQALNETRVRSGIRAYELFTQLRAEKKANGQVNEETKAQFNEVKKDLGFGLLLKRYTNNVVDATEEQIKQAARDTIPNVGPNFWAFRAMIASGGLIALLTFGAFVQNLRNKVTQIPLLLKVLLWGLPLPWIAIECGWFLAEYGRQPWAIYEILPVGVSASNLSTGDLWFSIGLICALYLAFIIVEMYLMFKYARLGPSALKTGKYYFEQSAK

SEQ ID NO: 2269 - DNA, 1638 bp, Haemophilus influenzae
atggctacaaattatattttcgtcactggcggtgtggtttcatcgttaggtaaaggcattgcggcagcatcattggcggcaattttagaagcacgtggtttaaacgtaaccattatgaaattagatccatatattaatgtggatcccggtacgatgagcccaacccaacacggggaagttttcgttactcaagatggtgcagaaacagatttagatttaggtcattatgagcgtttcatccgcacgaaaatgaccaaacgtaataacttcactacaggtaaaatttattctgaagtattacgtaaagagcgtcgcggcgattatcttggtgcaacaattcaagtgattccacatatcactaatgaaattaaagatcgcgttattgctggtgctcaaggtcacgacgttgtgattgttgaagtaggcggcactgttggggatattgaatcacttccattcttagaagcattacgtcaattagccgttcaagttggtcgtgaacatacgttatttatgcatttaaccttggtgccttacatcccaacggcgggtgaagtaaaaactaaaccaacccagcattcggtaaaagaattgctttctattggtattcaaccggatgtgttgatttgccgttcagatcgcatgattcctccaaatgaacgtgcgaaaattgctttattttgtaatgttgcagaacgtgcagtcatttcattaaaagatgtgaattcaatttatcaaatccccgcattattaaaatctcaaggtttagatgattttgtctgtgaacgtttccgtttaacttgccctgaagcagatcttactgaatgggagcaagtgctttacaagcaagccaatccagtgggagaagtaaccatcggtatggtaggtaaatacactgagttacccgatgcctataaatcagtaaatgaagccttaaaacacgcaggtttaacgaaccgtttaagtgtaagcattaaatatattgattcccaagatgttgaaaccaaaggtgttgaagtattaaaaggcgttgatggcattcttgttccagggggatttggttatcgtggtgtagagggtaaaattcgtaccgcacaatatgcacgagaaaacaaaattccttacttgggtatttgcttaggtatgcagatcgcgttgattgaatatgcacgtaatgtagcgggtttaactaaagccaattcatctgaatttgataaagattgtgaacaacctgtggtggcattaatcacagaatggcaagatgcggagggtaatactgaagtgcgtaccgatgaatcagatcttggcggaacaatgcgtttaggcgcacaacaatgtcatttggtatcaggtagccgcgctcgcgagctttatggcaaagaaaccattgaagagcgtcatcgtcatcgctatgaagtgaacaataccttgcttccacaaattgaaaaagcaggattgaaagtaactggattatctgcagataaaaaattggtagaaattatcgaagtgccaaatcatccttggtttgtcgcttgtcaattccatccagaatttacttctacgcctcgtgatggtcatccgttgtttgcaggctttgtaaaagcagcctatgaaaatcacaaaaaatctgtgaagtaa

SEQ ID NO: 2270 - protein, 545 aa, Haemophilus influenzae
MATNYIFVTGGVVSSLGKGIAAASLAAILEARGLNVTIMKLDPYINVDPGTMSPTQHGEVFVTQDGAETDLDLGHYERFIRTKMTKRNNFTTGKIYSEVLRKERRGDYLGATIQVIPHITNEIKDRVIAGAQGHDVVIVEVGGTVGDIESLPFLEALRQLAVQVGREHTLFMHLTLVPYIPTAGEVKTKPTQHSVKELLSIGIQPDVLICRSDRMIPPNERAKIALFCNVAERAVISLKDVNSIYQIPALLKSQGLDDFVCERFRLTCPEADLTEWEQVLYKQANPVGEVTIGMVGKYTELPDAYKSVNEALKHAGLTNRLSVSIKYIDSQDVETKGVEVLKGVDGILVPGGFGYRGVEGKIRTAQYARENKIPYLGICLGMQIALIEYARNVAGLTKANSSEFDKDCEQPVVALITEWQDAEGNTEVRTDESDLGGTMRLGAQQCHLVSGSRARELYGKETIEERHRHRYEVNNTLLPQIEKAGLKVTGLSADKKLVEIIEVPNHPWFVACQFHPEFTSTPRDGHPLFAGFVKAAYENHKKSVK

SEQ ID NO: 2271 - DNA, 354 bp, Haemophilus influenzae
atgcaaaatarcgatggtggagaaagcgtgattgcaaaagcgttaactgttaaaggatggatgacattaattgttgtgactacggttggtactttgctttttgttcaagcattacaagctgctggtggtagttcaacaggtttagatggtctaactacaattattacggttgcggcacagattttaatgattttgcgttatcgtgaacaatggttgttatggattggattaaatattctttctattttcttatgggcagagacaccagcaatatacttaatgtattcagcctacttacttaactcgttgtatggttattataactggacgaaattagttaagcgtactaactaa

SEQ ID NO: 2272 - protein, 117 aa, Haemophilus influenzae
  VARIANT 4: Xaa is any amino acid
MQNXDGGESVIAKALTVKGWMTLIVVTTVGTLLFVQALQAAGGSSTGLDGLTTIITVAAQILMILRYREQWLLWIGLNILSIFLWAETPAIYLMYSAYLLNSLYGYYNWTKLVKRTN

SEQ ID NO: 2273 - DNA, 177 bp, Haemophilus influenzae
  misc_feature 9, 10, 11, 12, 13: n is any nucleotide
atggaatgnnnnnaaggtaaaattagtaattatttctttggattaatttttgcttacacttatttttatgtcgcttggggatcgaatttcttaggcgaaatgaataccgtactttacgtatatttgccctctcaatttattggttactttatgatggaaagccaatatgcaaaatar

SEQ ID NO: 2274 - protein, 58 aa, Haemophilus influenzae
  VARIANT 3, 4, 5: Xaa is any amino acid
MEXXXGKISNYFFGLIFAYTYFYVAWGSNFLGEMNTVLYVYLPSQFIGYFMMESQYAK

SEQ ID NO: 2275 - DNA, 108 bp, Haemophilus influenzae
  misc_feature 86, 87, 88, 89, 90: n is any nucleotide
gtgatggatttcacaactttagaattaaatgcttctacacctttacattaccaattcacaatgcgaaaatggtcacctcaaaattnnnnncattcattcattaattaa

SEQ ID NO: 2276 - protein, 35 aa, Haemophilus influenzae
  VARIANT 29, 30: Xaa is any amino acid
MMDFTTLELNASTPLHYQFTMRKWSPQNXXHSFIN

SEQ ID NO: 2277 - DNA, 768 bp, Haemophilus influenzae
atgttaaaagtaagtaatattcaaaaaaactttaatggcaatcatgtgttaaaaggcattgattttgaaattaataaaggcgaagtggtcgcaattttaggcccttctggttctggaaaaaccacctttttacgttgtttaaacttgcttgaacgaccagagcaaggcattttggaatttactgatggcagtctaaaaattgattttagccagaaaattagtaaagcagatgaattgaagttacgccgacgttcgtcaatggtctttcagcaatacaatttattccctcaccgttctgcccttgaaaatgttatggagggaatggttgttgtgcaaaaacaagataaagctcaagctcgtgaaaaagcacttagtttgctagaaaaagtagggcttaaaaataaagcggatttatttccatcccaactttctggcggtcagcaacagcgagtggggattgctcgagcccttgcggtaaaacctgatattattttattagatgaacctacatcggcattagatcctgaattggtgggcgaagtgttacaaacactaaaaatgctcgcccaagaaggctggacaatgattattgttactcacgaaatgcagtttgcgaaagatgtcgcggatcgtgtgattttaatggcggatggatatattgtagaacaaaatacagcagataaattcttcacttgcccacaacacgagcgcactaaacagttcttgttacaagcaaaaataccacttgagcttgattattatatttaa

SEQ ID NO: 2278 - protein, 255 aa, Haemophilus influenzae
MLKVSNIQKNFNGNHVLKGIDFEINKGEVVAILGPSGSGKTTFLRCLNLLERPEQGILEFTDGSLKIDFSQKISKADELKLRRRSSMVFQQYNLFPHRSALENVMEGMVVVQKQDKAQAREKALSLLEKVGLKNKADLFPSQLSGGQQQRVGIARALAVKPDIILLDEPTSALDPELVGEVLQTLKMLAQEGWTMIIVTHEMQFAKDVADRVILMADGYIVEQNTADKFFTCPQHERTKQFLLQAKIPLELDYYI

SEQ ID NO: 2279 - DNA, 717 bp, Haemophilus influenzae
atgatattactcaataattggttggcgagtcttccatttatgagtgcagaacgagctgattatgtaatcagctcgttttggcctatgttggaagcagcaattttatacacattgccattggcagtcatttccttcttctgtggtttgcttattgcagtgattgttgcagttattcgtactttgcctagtcctaatttacccttaaaattgttacaggctttatgtcgagtgtatatctctataattagaggtacaccgatgttagtacaaatttttattattttttatggattacctgaagtcggtattactttagagccttttccgacagcgattattgcattttctattaatataggtgcttatgcagcagagacagttcgtgcttcaattattgctatacctaaagggcagtgggaagcctcttatgcgataggtatgaattatcgacaagcatttattcgtacaattatgccacaggctttacgtatttcagtaccatcgctttctaatacttttattagtacagtgaaagacacttcattagcttctcttgttttagtgacagaattatttcgtgtcgcacagaatattacggcagcaaactatgaatttattttgatttatagtgaagcagcactgatttattgggttttctgttttgttttatctttcttacaagatcgtcttgaaattcgcttatctcgccatttataa

SEQ ID NO: 2280 - protein, 238 aa, Haemophilus influenzae
MILLNNWLASLPFMSAERADYVISSFWPMLEAAILYTLPLAVISFFCGLLIAVIVAVIRTLPSPNLPLKLLQALCRVYISIIRGTPMLVQIFIIFYGLPEVGITLEPFPTAIIAFSINIGAYAAETVRASIIAIPKGQWEASYAIGMNYRQAFIRTIMPQALRISVPSLSNTFISTVKDTSLASLVLVTELFRVAQNITAANYEFILIYSEAALIYWVFCFVLSFLQDRLEIRLSRHL

SEQ ID NO: 2281 - DNA, 774 bp, Haemophilus influenzae
atgaaaaaattactttttacgaccgcacttttaactggagctattgctttctcaacgttttctcacgcaggcgaaattgccgatcgtgttgaaaaaacgaaaactttattagtagggactgaagggacttatgcaccatttactttccatgataaaagtggaaaattaacaggctttgatgtagaggttattcgtaaagttgctgaaaagctcggtttgaaagtggaatttaaagaaacacaatgggatgcaatgtatgcggggttaaatgcaaaacgttttgatgtgattgcaaaccaaactaacccaagcccagagcgtttaaaaaaatacagtttcacaacgccttataattattctggtggggtgattgtaacaaaatcatcggataacagtattaaatcatttgaagacttgaaaggtcgtaaatctgcgcaatctgcaacaagtaactggggtaaagatgcaaaagctgcaggtgcgcagattcttgtagtggatggtttagcacagagcttagagcttattaaacaaggccgtgcagaagcaacaattaatgataaattggctgtattagattattttaaaaaacacccaaattctggtttaaaaattgcttatgatcgtggggataaaactccgactgcctttgcttttttacaaggtgaagatgcattgattacaaaatttaatcaagtacttgaagcacttcgccaagatggtacattaaaacagatttcaattgaatggtttggttatgatattactcaataa

SEQ ID NO: 2282 - protein, 257 aa, Haemophilus influenzae
MKKLLFTTALLTGAIAFSTFSHAGEIADRVEKTKTLLVGTEGTYAPFTFHDKSGKLTGFDVEVIRKVAEKLGLKVEFKETQWDAMYAGLNAKRFDVIANQTNPSPERLKKYSFTTPYNYSGGVIVTKSSDNSIKSFEDLKGRKSAQSATSNWGKDAKAAGAQILVVDGLAQSLELIKQGRAEATINDKLAVLDYFKKHPNSGLKIAYDRGDKTPTAFAFLQGEDALITKFNQVLEALRQDGTLKQISIEWFGYDITQ

SEQ ID NO: 2283 - DNA, 1275 bp, Haemophilus influenzae
atggataaatttcgtgtttatgggcaatctcgtttaagtggaagtgtgaatatttcaggcgcaaaaaacgccgcacttccaattctttttgcggctattttagctacagaacctgttaaattgacaaatgttcccgaacttaaagatattgaaacaactttaaatattttgcgtcaattaggcgtaattgcaaatcgtgatgaaactggtgcagttttattagatgcctctaatatcaatcatttcactgcaccttatgaattggttaaaactatgcgtgcttcaatttgggcattggcacctttagtcgctcgtttccatcaagctcaagtctcattacctggaggttgttctatcggagctagacctgttgatctccacattagcggtttagaaaaattaggtgcggacatcgttcttgaagaaggatatgtaaaagcacaagtatcagatcgtcttgttggaactcgaattgtaatagaaaaagtaagtgtaggcgcaactttatctattatgatggcagcaacccttgcgaaaggaaccaccgtaattgaaaacgccgctcgtgaacctgaaattgtagatactgcagatttccttaataaaatgggtgcaaaaatatctggtgcaggctctgatcacattacgattgaaggtgttgaacgtttaactggttgtgagcacagtgttgtgccagatcgtattgaaacgggaacattcttaattgctgcagccatttcgggcggtcgtgttgtttgtcaaaatactaaagcggatactttagatgccgtaattgataaactccgtgaagctggtgcgcaagttgatgtaactgaaaatagcattactttagatatgcttggtaatcgccctaaagcagtgaatattcgtactgcaccacatccagggttcccaactgatatgcaggctcaatttactttattaaatatggtggcagaaggtacaagcattatcactgaaacgatttttgaaaatcgttttatgcatattcctgaattaattcgtatgggtggtaaagctgaaattgaagggaatacagcggtatgtcacggggttgaacaattgtctggcacagaggtaatagcgacagatttacgcgcttcaatcagtttagtgcttgcaggttgtatcgcaacgggtgaaaccattgtagatcgtatttatcatatcgatcgtggttatgaacatatcgaagataaattacgtggtctaggtgcgaaaattgaacgtttttctggaagtgatgaagcgtaa

SEQ ID NO: 2284 - protein, 424 aa, Haemophilus influenzae
MDKFRVYGQSRLSGSVNISGAKNAALPILFAAILATEPVKLTNVPELKDIETTLNILRQLGVIANRDETGAVLLDASNINHFTAPYELVKTMRASIWALAPLVARFHQAQVSLPGGCSIGARPVDLHISGLEKLGADIVLEEGYVKAQVSDRLVGTRIVIEKVSVGATLSIMMAATLAKGTTVIENAAREPEIVDTADFLNKMGAKISGAGSDHITIEGVERLTGCEHSVVPDRIETGTFLIAAAISGGRVVCQNTKADTLDAVIDKLREAGAQVDVTENSITLDMLGNRPKAVNIRTAPHPGFPTDMQAQFTLLNMVAEGTSIITETIFENRFMHIPELIRMGGKAEIEGNTAVCHGVEQLSGTEVIATDLRASISLVLAGCIATGETIVDRIYHIDRGYEHIEDKLRGLGAKIERFSGSDEA

SEQ ID NO: 2285 - DNA, 300 bp, Haemophilus influenzae
ttggatcgcaaattttacatagcttacttaaacggaaatccaatggaacttcaaaaaattgaacaaattttaaaagacacgctaaatatcgtagaagtctatgcacaaggtgaaaatgcacattttggtgtaattgtagtgagtgatgaaattgctgcactatctcgtgtaaaacaacaacaaacgatttatgcccctttaatgccttattttagcactggtgaaattcacgctctaaccatcaaaacttataccgtagaaaaatggaaacgcgatcgtgcattaaaccagtttaattaa

SEQ ID NO: 2286 - protein, 99 aa, Haemophilus influenzae
MDRKFYIAYLNGNPMELQKIEQILKDTLNIVEVYAQGENAHFGVIVVSDEIAALSRVKQQQTIYAPLMPYFSTGEIHALTIKTYTVEKWKRDRALNQFN

SEQ ID NO: 2287 - DNA, 318 bp, Haemophilus influenzae
atgctaaattgggatttgcaaaaaaataatgataaaataacgctctttttgtttggggaactatctcgcagcaccttgttaccaatgtggcagcaacgtggcgtttttttgtcagaaagtacacttgataaaactattgttgaatggaatttatctggtcttcagcatattgattcagctggttttacagcgctttgtgattttttacgagagtgtcaaaagattaacaaaacagtacgattagtttatccaccaaaacaattattaaccctagcagatcttgttggtttatctgattggatcgcaaattttacatag

SEQ ID NO: 2288 - protein, 105 aa, Haemophilus influenzae
MLNWDLQKNNDKITLFLFGELSRSTLLPMWQQRGVFLSESTLDKTIVEWNLSGLQHIDSAGFTALCDFLRECQKINKTVRLVYPPKQLLTLADLVGLSDWIANFT

SEQ ID NO: 2289 - DNA, 645 bp, Haemophilus influenzae
atgaaccttactcaactaaaaaaatggtttactattttaactttcgtattaaccgcacttttggttacacgaacagctattgcagaaacaagtccttatgttttaatgcagcaagcgtcagataaactattttctgatatacaagctaatcaaagtaaaattaaacaagatccaaattatttacgtactattgttcgtaatgatttattgccttatgtaaacttagaatatgcaggttctaaagtattaggttcatactacaaatcaacctctacagaacaacgagaaaaatttttcaagacttttggtgaattgattgagcaaaagtacgcacaaacattaacaaattattctaatcaaaaaattcaaattgaatcagaaaaagaattaggcgataacaattttgtaaatattcgcgtaagtattattcaaactaatggcgctgctccgatcctattagattttaaatggcgtaaaggcaataaaagtggggaatggaaagcctacgatatggcagcagcaggcgtaagtatgctggaagatacgataaaaaattgggttggtattttaaacaaacaaggtattgatacattaatcacaaagatgcagcaatctgcctcacaacctataattttcaatcaataa

SEQ ID NO: 2290 - protein, 214 aa, Haemophilus influenzae
MNLTQLKKWFTILTFVLTALLVTRTAIAETSPYVLMQQASDKLFSDIQANQSKIKQDPNYLRTIVRNDLLPYVNLEYAGSKVLGSYYKSTSTEQREKFFKTFGELIEQKYAQTLTNYSNQKIQIESEKELGDNNFVNIRVSIIQTNGAAPILLDFKWRKGNKSGEWKAYDMAAAGVSMLEDTIKNWVGILNKQGIDTLITKMQQSASQPIIFNQ

SEQ ID NO: 2291 - DNA, 501 bp, Haemophilus influenzae
atgagacaaacaattaaatatgaattttgggtcgggttatttttattacttggtattggtgccttagtttttttaggtttacgcgtagctaatgtacaaggttttgctgagacgaaatcttataccgtgacggcaatttttaataatattggcggacttaaagtgcgcgcaccactaaaaattggaggcgtagtaattgggcgtgtgagtgctattacgcttgatgaaaaaagctatttaccaaaagtaagtattgcgattaatcaagaatataatgaaatcccagaaaacagttctttatcaattaaaacatcaggtttattaggtgagcaatatattgccttgacaataggttttgatgatggagatacagcaatgcttaaaaatggtagccaaattcaagacactacatcagctatagtattggaagatttaattgggcaattcttatacggaagtaaaaaatcagacggcaatgaaaaatcagaatccgcagaataa

SEQ ID NO: 2292 - protein, 166 aa, Haemophilus influenzae
MRQTIKYEFWVGLFLLLGIGALVFLGLRVANVQGFAETKSYTVTAIFNNIGGLKVRAPLKIGGVVIGRVSAITLDEKSYLPKVSIAINQEYNEIPENSSLSIKTSGLLGEQYIALTIGFDDGDTAMLKNGSQIQDTTSAIVLEDLIGQFLYGSKKSDGNEKSESAE

SEQ ID NO: 2293 - DNA, 786 bp, Haemophilus influenzae
atgatcgtcaattttatttctgctttaggaaaacaggtgatcgactttttccgtgcattggggcgagcaggctttatgttatttggtgcattgatcggcaagccacaaattcgtaagcattttcctttgcttgtgaagcaaatgcatgttttaggtgtccaatcgttactcattattttgttgtccggtttatttattggaatggtattaggactacaaggttatgtcgtattagtcgatttttctgctgaaacaagtttaggtcagttggtagcactttctcttttgcgagaattagggcctgttgttaccgcacttttatttgctggtcgagctggttcggctttaacagctgaaataggcttaatgaaagccactgaacaactttctagtcttgaaatgatggctgttgatcctttacgtcgagtgattgcacctcgtttttgggcaggggttatttccatgccaattttgtcaatcttgtttatcgcgattggtatttggggcggttccttagtaggtgtggattggaaaggtgttgattcaggcagcttttggtctgttatgcaaaattccgtgagttggagctatgatattttaaatggctttattaaagcggttttctttgctgtagccgtaacttggattgcgctttttaatggttatgattgtatgccaacatcagaaggtatcagtcaagctacaacacgaacagttgtgcatgcatctcttgttgttctaggattagattttattttgactgctattatgtttggcgcaagttaa

SEQ ID NO: 2294 - protein, 261 aa, Haemophilus influenzae
MIVNFISALGKQVIDFFRALGRAGFMLFGALIGKPQIRKHFPLLVKQMHVLGVQSLLIILLSGLFIGMVLGLQGYVVLVDFSAETSLGQLVALSLLRELGPVVTALLFAGRAGSALTAEIGLMKATEQLSSLEMMAVDPLRRVIAPRFWAGVISMPILSILFIAIGIWGGSLVGVDWKGVDSGSFWSVMQNSVSWSYDILNGFIKAVFFAVAVTWIALFNGYDCMPTSEGISQATTRTVVHASLVVLGLDFILTAIMFGAS

SEQ ID NO: 2295 - DNA, 795 bp, Haemophilus influenzae
atgaatcaaaatctaattgaagttaagaatctcacctttaaacgcggtgatcgcgtgatttacgataacctgaatttgcaagtaaaaaagggaaaaatcactgcgatcatgggaccgtcggggattggtaaaaccaccttacttaaattgatcggtgggcaactaatgccagagcaaggtgaaattttgtttgatggacaagatatttgtcgtctatctaatcgtgaactgtacgaagtacgcaagcggatggggatgttattccaatcaggtgcactttttacggatatttctacttttgataatgtcgcctttccaattcgtgaacatacgcatttgcctcaaagtttaattcgtcaaatcgtgttgatgaaattggaggcggttgggttgcgaggcgctgccgcattgatgccttcagaactttctggtggtatggctcgtcgagctgcattagcgcgtgctattgcgcttgaccctgatttaattatgtttgatgaaccatttactgggcaagatccgattagtatgggcgtaattttaagcctgattaaacgattaaatgaagcgttaaatttgacttctatcgtagtgtcacacgatgtggaggaagtattgagtattgcagattatgcctatattattgcagaccaaaaagtcatcgcagaaggaacatctgagcagcttttacaaagccaagatccgcgagtggtgcaattcttaaaaggtgaatctgatggtcctgtgcgctttaagtacccagcgcaagattatatgaaggaattgtttgaatga

SEQ ID NO: 2296 - protein, 264 aa, Haemophilus influenzae
MNQNLIEVKNLTFKRGDRVIYDNLNLQVKKGKITAIMGPSGIGKTTLLKLIGGQLMPEQGEILFDGQDICRLSNRELYEVRKRMGMLFQSGALFTDISTFDNVAFPIREHTHLPQSLIRQIVLMKLEAVGLRGAAALMPSELSGGMARRAALARAIALDPDLIMFDEPFTGQDPISMGVILSLIKRLNEALNLTSIVVSHDVEEVLSIADYAYIIADQKVIAEGTSEQLLQSQDPRVVQFLKGESDGPVRFKYPAQDYMKELFE

SEQ ID NO: 2297 - DNA, 636 bp, Haemophilus influenzae
atgtcttacactctccctgaattaggctatgcctacaatgcgttagaaccacattttgatgcgcaaacaatggaaatccatcatagtaaacaccaccaagcttacgtaaacaatgcaaatgctgcattagaaggtttacccgctgaattagtagaaatgtatccgggtcatttaatttctaaccttgataaaattcctgcagaaaaacgtggagcattacgtaataatgctggtggccacacaaaccacagtttattttggaaaagcttgaaaaaaggtactactttacaaggcgcattaaaagatgcgattgaacgcgatttcggttctgtagatgcatttaaagcagagtttgaaaaagcagcagcaactcgtttcggttcaggctgggcatggttagtattaaccgctgaaggtaaattagccgttgtatcaacagcaaaccaagataacccattaatgggtaaagaagtggcaggttgtgagggtttcccacttttaggtttagacgtttgggaacacgcttactacttaaaattccaaaaccgtcgtccagactacattaaagaattctggaatgtggtaaactgggatttcgttgcagaacgttttgaacaaaaaaacagcacactgtaa

SEQ ID NO: 2298 - protein, 211 aa, Haemophilus influenzae
MSYTLPELGYAYNALEPHFDAQTMEIHHSKHHQAYVNNANAALEGLPAELVEMYPGHLISNLDKIPAEKRGALRNNAGGHTNHSLFWKSLKKGTTLQGALKDAIERDFGSVDAFKAEFEKAAATRFGSGWAWLVLTAEGKLAVVSTANQDNPLMGKEVAGCEGFPLLGLDVWEHAYYLKFQNRRPDYIKEFWNVVNWDFVAERFEQKNSTL

SEQ ID NO: 2299 - DNA, 639 bp, Haemophilus influenzae
atgtttgagcaacacaagttatctctgcaaaatttatcctgccaacgtggtgagcgcgtactttttcgtgctttgacttgcgattttaatagcggtgattttgtacaaattgaagggcataacggcataggtaaaacgagcttgttacgtattcttgctggtttagcccaatctttagaaggcgaagtgcggtgggatgctgaagcaatttctaaacaacgtgaacagtatcatcagaatttgctttatttaggacatcttttaggcgttaaaccagagctaacggcgtgggaaaatttgcagttttatcaacgaattagtcaagctgaacaaaacaccgatatgttgtgggatttgcttgagaaagtgggattattagggcgtgaagatttgcctgccgcacaactttctgcaggacaacaaaagcgtatcgcgttaggtcgcttatggctgtctcaagcacccttatggattttagatgagccctttactgcgattgataaaaaaggcgtgaaaattctaaccgcactttttgatgagcatgctcaacgaggtggtattgtgttgttaaccagccaccaagaagtgccaagttctcatctgcaaaaattgaatttagcggcttataaagcggaataa

SEQ ID NO: 2300 - protein, 212 aa, Haemophilus influenzae
MFEQHKLSLQNLSCQRGERVLFRALTCDFNSGDFVQIEGHNGIGKTSLLRILAGLAQSLEGEVRWDAEAISKQREQYHQNLLYLGHLLGVKPELTAWENLQFYQRISQAEQNTDMLWDLLEKVGLLGREDLPAAQLSAGQQKRIALGRLWLSQAPLWILDEPFTAIDKKGVKILTALFDEHAQRGGIVLLTSHQEVPSSHLQKLNLAAYKAE

SEQ ID NO: 2301 - DNA, 666 bp, Haemophilus influenzae
atgatttttttagagataattaaacgagaacttcaaattgcgatgcgcaaaaatgcggagattttaaatccgctatggttctttttgcttgtgattactttgtttccgcttgttattgggccagagcctaaattactttcccgtatcgcaccgggtatcgcatgggtagctgcattactttcagcattgctttcttttgagcgtttattccgtgatgattttattgatggctctcttgaacaattaatgctaaccgcacagcctttgccaatgacagctttggctaaagtcgttgcacattggttactcactggtttgccgcttattttattatcgcctattgcggctttgttactttctcttgaggtcaatatttggtgggcattagttttgacattgttactgggcacccctgtattgagctgtatcggtgctattggcgtggctttaacggtgggattgcgaaaaggtggcgtgttgttgagtttgcttgttgttccgttgtttattcctgttttaatttttgcttcatcaatactagaagcagcaggattaaatgtgccttatgggggacaactggcgattttaggtgccatgatggttggtgcagtaacgctttcgccttttgccattgctgcagcgttgcgaattagtttagataattaa

SEQ ID NO: 2302 - protein, 221 aa, Haemophilus influenzae
MIFLEIIKRELQIAMRKNAEILNPLWFFLLVITLFPLVIGPEPKLLSRIAPGIAWVAALLSALLSFERLFRDDFIDGSLEQLMLTAQPLPMTALAKVVAHWLLTGLPLILLSPIAALLLSLEVNIWWALVLTLLLGTPVLSCIGAIGVALTVGLRKGGVLLSLLVVPLFIPVLIFASSILEAAGLNVPYGGQLAILGAMMVGAVTLSPFAIAAALRISLDN

SEQ ID NO: 2303 - DNA, 741 bp, Haemophilus influenzae
atgtggaagtggttacatccttatgcaaaacctgaaactcaatatcgtatctgcggtaaattgagtccgttatttgcatttttaacgcttatcttactcggtgttggcattgtatggggcttagcattcgccccagcagattaccaacagggcaatagtttccgaattatgtatgtacatgtgccgacagcgatttggtcaatgggtgtgtacggttcaatggcgattgcagctgtggttgccctagtgtggcaaattaagcaagctcacctcgcaatgattgcaatggcaccaattggtgcattgtttactttcttatcgcttgttacgggggcaatttgggggaaaccaatgtggggtacttggtgggtgtgggatgctcgcttaactgcagaattgattttattctttctttatcttggtatcttagccctttattctgctttttcagatcgtaacataggcgcaaaagcggcggggattttatgcattacaacggtcgtgattttaccgattattcatttttcggtggagtggtggaacacattacatcaaggggcgagtattaccaaatttgaaaaaccatccattgcaattccaatgttggttccattaattttgtgtatcttcggttttttgaccttgtatatttggcttactttagttcgttatcgcgtggaattattgaaagaagatgcaaaacgtccttgggttaaagcattagctcaaacactgaaataa

SEQ ID NO: 2304 - protein, 246 aa, Haemophilus influenzae
MWKWLHPYAKPETQYRICGKLSPLFAFLTLILLGVGIVWGLAFAPADYQQGNSFRIMYVHVPTAIWSMGVYGSMAIAAVVALVWQIKQAHLAMIAMAPIGALFTFLSLVTGAIWGKPMWGTWWVWDARLTAELILFFLYLGILALYSAFSDRNIGAKAAGILCITTVVILPIIHFSVEWWNTLHQGASITKFEKPSIAIPMLVPLILCIFGFLTLYIWLTLVRYRVELLKEDAKRPWVKALAQTLK

SEQ ID NO: 2305 - DNA, 204 bp, Haemophilus influenzae
atgtttttccaaacttggagtgatttttttaatatgggtggctacggtttttacgtatggttatcctatgcagtaagtttagtggcagttattgccttaattgttcaaagtgtaaaacaacgcaagacagtgttacaaaatgtattgcgtgagcaacaacgcgaagaacgtttacaacaagcaaataagggggacacactatga

SEQ ID NO: 2306 - protein, 67 aa, Haemophilus influenzae
MFFQTWSDFFNMGGYGFYVWLSYAVSLVAVIALIVQSVKQRKTVLQNVLREQQREERLQQANKGDTL

SEQ ID NO: 2307 - DNA, 522 bp, Haemophilus influenzae
atgaatccaagacgtaaatccagatttaaattagtcatttttgttgtgcttggcattgctattgcaagtggattgatgctgtatgcattacgtcaaaatatcgacttgttttatacgccatctgaagtgattcaaggtaaggataataatccgaatcaaaaacctgaagtggggcagcgtattcgtgttggcggtatggtggttgaaggcacggtagtgcgtgatccaaaaagcttaaaagtgcggttcgatttaaatgatattggtcctgcgatcactgttgaatatgaaggcattttgccagatcttttccgtgaagggcaggggattgtggctcaaggcgtattaactcagtcagcggttttaagcgcgacagaagtattggctaaacacgatgaaaattatgtgccgccagaattaggcgaaaaaatgcaaaaagtacataaaccaatggggattaaggcagcagatttaaaaggcgaaagtgagcgtgatcgtcaagaaaaagaaggcgcaaaatga

SEQ ID NO: 2308 - protein, 173 aa, Haemophilus influenzae
MNPRRKSRFKLVIFVVLGIAIASGLMLYALRQNIDLFYTPSEVIQGKDNNPNQKPEVGQRIRVGGMVVEGTVVRDPKSLKVRFDLNDIGPAITVEYEGILPDLFREGQGIVAQGVLTQSAVLSATEVLAKHDENYVPPELGEKMQKVHKPMGIKAADLKGESERDRQEKEGAK

SEQ ID NO: 2309 - DNA, 1947 bp, Haemophilus influenzae
atgattgctgaattaggaaattatgcgctggctttaagtttagctgtatcgcttatgttggcgattttccctttgtggggggcggaaaagggcaatgtacaattaatggcattagctcgcccaatgacttatggtttatttgcaagcctaagcattgcttttgctgcgctattttatttattcgcagtcaatgattttagcgtgcaatatattgtaaataattctaatactactttacccatttattatcgtttatctgcggtatggggttcccatgaaggctctttgttactgtggatttggctactggcggtttggtcatttgccgttgctttattgagtaaacatttaccccaagaagcggttgctcgcgtgcttggtattatggggattattagcgtcggttttgtattgttcgtcttgtttacatcaaatcctttcacgcgtactttccctgatttcccagtagatggaaaagaacttaatccaatgttgcaagatgtaggcttgattttccaccctccattactttatatgggctatgtgggtttttcggtggcatttgcgtttgcgattgcatccttaatgactggaaaattagattcagcttgggcacgttggtcacgtccttggacgcttgctgcttgggtgtttttaactttaggtatcgtactcggttcttggtgggcttattatgagcttggctgggggggctggtggttctgggatccagtagaaaactcatcgtttatgccgtggcttgctggtactgcattgattcactctctttctgtgacagaaaaacgaggttctttcaaagcttggacggtattacttgcgattttagccttttcactttgtctgctcggcaccttcttagttcgttctggtatcttagtttcagttcacgcatttgcatcggatccaactcgtggtttgtatattttggcttacctcgttgtggtaattggcggttcgcttgcactctatgcgtataaaggcagtcaaattcgttctcgtgataatgcagaacgctattcacgtgaaagtatgttgttattgaataatatcttattaatgaccgcactttgcgttgtattcttaggaacgttgttaccactcgttcacaaacaacttggtttaggctctatttctattggtgcgccgttctttgatcaaatgttcttaattattatgacaccatttgcattattgcttggtattggacctttagtgaaatggcgtagagaccaattttctgcaattcgtacgcctgttgttatcagcgtatttgttatgctgattgcaggttttgcgttaccttatttcttgcaagataaaattaccgtgagttcagtgcttggttcaatgatgactgtgattattgtgttacttgtgctttatgaattgcaacaacgtgcgacgcatcgtgaatcattctttgttggcgtacgcaaactatctcgttctcattggggaatgatgttagctcacttaggcgtagctatgactgtttgggggatcgcatttagccaaaactttagcgtagaacgtgatgtgagaatgaaagttggcgagaacgcacaaattggtcgttacgattttaaattcgctggtgtgacggatgaaaatggtccaaactatattggtggaaaagctcaaattgatatttcgaaagatgggcaaccagagacaagtttattcgcagaaaaacgtttttacacagtaagtcggatgtctatgacagaagccgcaattgctggtggtttaactcgtgacctttatgtggcacttggcgaaaaacttgaggacaattcttgggcgttacgcttatattacaagccatttattcgctggatttggattggcggcttatttatggcgttaggtggattgttgtgcatgttcgatcgacgctatcggtttaatgtgttgttgaagaaataa

SEQ ID NO: 2310 - protein, 648 aa, Haemophilus influenzae
MIAELGNYALALSLAVSLMLAIFPLWGAEKGNVQLMALARPMTYGLFASLSIAFAALFYLFAVNDFSVQYIVNNSNTTLPIYYRLSAVWGSHEGSLLLWIWLLAVWSFAVALLSKHLPQEAVARVLGIMGIISVGFVLFVLFTSNPFTRTFPDFPVDGKELNPMLQDVGLIFHPPLLYMGYVGFSVAFAFAIASLMTGKLDSAWARWSRPWTLAAWVFLTLGIVLGSWWAYYELGWGGWWFWDPVENSSFMPWLAGTALIHSLSVTEKRGSFKAWTVLLAILAFSLCLLGTFLVRSGILVSVHAFASDPTRGLYILAYLVVVIGGSLALYAYKGSQIRSRDNAERYSRESMLLLNNILLMTALCVVFLGTLLPLVHKQLGLGSISIGAPFFDQMFLIIMTPFALLLGIGPLVKWRRDQFSAIRTPVVISVFVMLIAGFALPYFLQDKITVSSVLGSMMTVIIVLLVLYELQQRATHRESFFVGVRKLSRSHWGMMLAHLGVAMTVWGIAFSQNFSVERDVRMKVGENAQIGRYDFKFAGVTDENGPNYIGGKAQIDISKDGQPETSLFAEKRFYTVSRMSMTEAAIAGGLTRDLYVALGEKLEDNSWALRLYYKPFIRWIWIGGLFMALGGLLCMFDRRYRFNVLLKK

SEQ ID NO: 2311 - DNA, 546 bp, Haemophilus influenzae
atgaaaaaaaaattactcgttcctcttattctctttttatcaataacaattgcctttttagtgcaattaaaacgcaatgcgcaaggtgaagatattaaagcattagagtcagctttggttggaaagcctgtgccagcaaaaaatttgacggagttgtttgaaaataaaacttacacgaatgaattgtttcaacaaggtgagccagttttgcttaacgtatgggcaacttggtgtccgacttgttatgccgaacatcaatatttaaacaaacttgctaaagagggtgtgagaattatcggtttagattataaagatgaatcacctaaagcaatgaagtggttaaaagatcttggcaatccttatcaagttgttttaaaagatgaaaaaggttctttcggtttggatttaggggtatatggtgcgccagaaacgttcattgtagatggaaaaggtgtgattcattatcgttatgctggagatgtaaacgaaaaagtttggactcagactttaaaaccaatttatgacaaactttcggagcaacaataa

SEQ ID NO: 2312 - protein, 181 aa, Haemophilus influenzae
MKKKLLVPLILFLSITIAFLVQLKRNAQGEDIKALESALVGKPVPAKNLTELFENKTYTNELFQQGEPVLLNVWATWCPTCYAEHQYLNKLAKEGVRIIGLDYKDESPKAMKWLKDLGNPYQVVLKDEKGSFGLDLGVYGAPETFIVDGKGVIHYRYAGDVNEKVWTQTLKPIYDKLSEQQ

SEQ ID NO: 2313 - DNA, 462 bp, Haemophilus influenzae
atgaaaaaaacatggctatttttgaccgcacttttgtttagctcggtggcgttttcagctattgatgcattaaattttagttctccacagcaagagagtgattaccatcaattaacacaatctttgcgttgccctcaatgtcaaaataacaatattgcggattccaatgcgactatcgcagtggatatgcgtggcaaagtatttgagcttttacaagaaggcaaatcaaaaaatgacgtagtggattatatggtggctcgctatggcaattttgtaacctatgatcctcctataacagcgagtacattagtgctatggattgcgccattattgcttgtgttgttaggcgtggtgtttttattaagacgcaaacctaaaacccaaagtgcggtgaaatcccaagagattttaacggatgaagataatgcacgtttggcagaattattaaacaaggataaatag

SEQ ID NO: 2314 - protein, 153 aa, Haemophilus influenzae
MKKTWLFLTALLFSSVAFSAIDALNFSSPQQESDYHQLTQSLRCPQCQNNNIADSNATIAVDMRGKVFELLQEGKSKNDVVDYMVARYGNFVTYDPPITASTLVLWIAPLLLVLLGVVFLLRRKPKTQSAVKSQEILTDEDNARLAELLNKDK

SEQ ID NO: 2315 - DNA, 918 bp, Haemophilus influenzae
atgaattttacattaatttttatcttaaccactttagttgtggcgttaatttgtttttatcctttattatgtcaattcaaagcgaaacatgggcaaaaacgtgatgatttaaataaggcgttatatttctcgcgcttggaagaaattgagcaagataattcccaaggtttagttgaaaatgttgagcaactcaaacaagaattacagaaaaccttgcttgatgatgtgccgagcaaggttcaagagaatgtggattattctggcaaatcttatggaaaaatttggtttatctctggtgtattagcgttaggaattatcgcaggtccttcttattttatggtgggatcttggcaagccgaatcaatgttagagcaaacttatgcgaaattgccctatttctttgaccgaatgaaagatgaagataaaaatccattttctgatacagaaatgcagcaattttctaccgcacttcgaatcgatttgcagaaaaatccaactgatgctaaaaaatggtggatgctcggtcaaattgggatgaatttaggtgatgcacgtttggcattcgatagctatcaaaaggctaataaacttgaaccagataatgtgcaatataaattaggctatgctcgtatattgatgttttctgaagatgcgactgataaacttaaaggtggcaatttattgcgtgaagtgattcgtcaagaacacactaacattgaagcattgagtttactcgcattccgttattttgaaacggaagattataaaatggcggcagtgacttgggcgatgatgctacgcttaatgccgaaagatgatgagcgagttccattaattgaaaaaagtattcgtaccgcgcgtgatgctttagaagcgcaaaatgaagaaaaatcaaaaagtatcactcccgaaaaataa

SEQ ID NO: 2316 - protein, 305 aa, Haemophilus influenzae
MNFTLIFILTTLVVALICFYPLLCQFKAKHGQKRDDLNKALYFSRLEEIEQDNSQGLVENVEQLKQELQKTLLDDVPSKVQENVDYSGKSYGKIWFISGVLALGIIAGPSYFMVGSWQAESMLEQTYAKLPYFFDRMKDEDKNPFSDTEMQQFSTALRIDLQKNPTDAKKWWMLGQIGMNLGDARLAFDSYQKANKLEPDNVQYKLGYARILMFSEDATDKLKGGNLLREVIRQEHTNIEALSLLAFRYFETEDYKMAAVTWAMMLRLMPKDDERVPLIEKSIRTARDALEAQNEEKSKSITPEK

SEQ ID NO: 2317 - DNA, 516 bp, Haemophilus influenzae
ttgcactttttttctttgttctgcgtcattattggaagtttatttacttcacaattttcgattgcagaaaatgattctagtgcagtcacttatattgattctgaagataaaaaagcatttaattccgatgtttcaaataatgatgctcaaaaactagctcaaagtattgaatttaaagtttataaaatagatgaaaccacttcatcagaaagtatttatgaatctccagctggaatttgtcagggatttaagattacaagaggtgtagattacacaaattcgacttaccattatctttatccagacaatagaggagaattctatggcagtgtggttggtgcaactatttataaccaaaaagatcctcaaaatttaagttatgtgccagtttattcaattacagataaagatttatctaagcgtattcagttaaaagaaaataaaacattaaaggaaaaagcagcgaattatgtattagaaggtagggctgtattaactgacgtaatttgtaaatag

SEQ ID NO: 2318 - protein, 171 aa, Haemophilus influenzae
MHFFSLFCVIIGSLFTSQFSIAENDSSAVTYIDSEDKKAFNSDVSNNDAQKLAQSIEFKVYKIDETTSSESIYESPAGICQGFKITRGVDYTNSTYHYLYPDNRGEFYGSVVGATIYNQKDPQNLSYVPVYSITDKDLSKRIQLKENKTLKEKAANYVLEGRAVLTDVICK

SEQ ID NO: 2319 - DNA, 300 bp, Haemophilus influenzae
atgagaaaaatagtttttgttagttgtgtaattttaggtttagcagcatgttcatctcaaccagaacaaattggtggcggtgtttacgatatgaaaactgtgcaagaatataatgctcgagttattagtggtaatactgttacacaaactcaaaaggataaaataacgcaacaaattgatacaagtttaaaattaaaccaaagtgacaataaagttaaaacgagaacaagacgtgtattgcctgttcttccagtcacaccaagcgtcggatatcattataattatcactattttagataa

SEQ ID NO: 2320 - protein, 99 aa, Haemophilus influenzae
MRKIVFVSCVILGLAACSSQPEQIGGGVYDMKTVQEYNARVISGNTVTQTQKDKITQQIDTSLKLNQSDNKVKTRTRRVLPVLPVTPSVGYHYNYHYFR

SEQ ID NO: 2321 - DNA, 2013 bp, Haemophilus influenzae
atgacaaatattcaaactcaactagacaatctacgcaaaaccttgcgccaatatgaatacgaataccacgttttagatcatccgagcgtgcctgatagcgaatacgatcgtttatttcatcagctcaaagccctagaattagagcatcctgaatttctgacatcagattcgccaactcaacgtgttggtgcaaaaccactttctgggtttagccaaattcgtcacgaaattcctatgctctctttggataatgctttttccgatgcagaatttaatgcttttgtaaaccgcattgaagatcgtttaatcctattaccgaaaccacttactttctgttgcgaacctaaacttgatggcttggctgtgagtattttgtatgttaatggtgaacttacacaagccgccactcgtggtgatggcaccacaggcgaagatattacagccaatatccgcacgattcgtaatgttccattacaacttttaacagataatcctccagcacgtttagaagtgcggggcgaagtttttatgccgcacgcaggctttgagcgtttaaataaatatgcgttagaacataatgaaaaaacctttgctaatcctcgcaatgcagcggcaggctctttacgccagcttgatcctaatattaccagcaaacgtccgctggtattaaatgcttatggtattggaattgctgagggggttgatctgccgactacgcattatgctcgtttgcaatggctaaaatctatcgggattccagtaaatcctgaaattcgtttatgtaatggtgcagatgaagttttaggtttttatcgagatattcaaaacaaacgtagctcgttaggttatgatattgacggaacggtattaaaaatcaatgatatagccttacaaaatgaactaggatttatttctaaagcacctcgctgggcgattgcttataaattccccgcccaagaagaattaaccctgttgaatgatgttgaattccaagtgggtcgaactggcgcaatcacaccagttgccaaattagagccagtgtttgttgcaggcgttacagtaagtaatgccaccttacataatggcgatgaaattgaacgtttaaatatcgctattggcgatactgttgttattcgtcgagcaggcgatgtaattccacaaattattggcgtattacacgaacgtcgccctgataatgctaaaccaatcattttcccaacaaattgccctgtgtgcgattctcaaattattcgtattgaaggcgaagcagtagcacgttgcacgggaggattattctgtgcggcacagcgtaaagaggcgttaaaacatttcgtctctcgtaaagcaatggatattgatggtgtaggcggaaaattaatagagcaattagtcgatcgagaactgattcatacacctgcggacttatttaaacttgatttaaccacgctcacacgcttagaaagaatgggtgcaaaatctgcagaaaacgcactcaatagtcttgaaaatgcaaaaagcacgacgcttgctcgctttatttttgctttaggcattcgtgaagtgggcgaagccactgcattaaatcttgctaatcatttcaaaactttagatacgcttaaagacgcaaatcttgaagaacttcaacaagtgcctgatgtaggggaagttgtagcgaaccgaatttttatattttggcgtgaagcgcataatgttgcagtcgtggaggatttaatcgcacaaggtgtgcattgggaaactgtagaagtgaaagaagcaagtgaaaacttgttcaaagataaaactgtagtactgacaggcactcttacacaaatggggcgtaatgaagcaaaagccttattacaacagcttggtgcaaaagtaagtggttcggtatccagtaaaacagatttcgttatcgcaggcgatgcggcaggctctaaacttgcaaaagctcaagaactaaatattacagtattaacagaagaagaatttttagcacagatgacaagataa

SEQ ID NO: 2322 - protein, 670 aa, Haemophilus influenzae
MTNIQTQLDNLRKTLRQYEYEYHVLDHPSVPDSEYDRLFHQLKALELEHPEFLTSDSPTQRVGAKPLSGFSQIRHEIPMLSLDNAFSDAEFNAFVNRIEDRLILLPKPLTFCCEPKLDGLAVSILYVNGELTQAATRGDGTTGEDITANIRTIRNVPLQLLTDNPPARLEVRGEVFMPHAGFERLNKYALEHNEKTFANPRNAAAGSLRQLDPNITSKRPLVLNAYGIGIAEGVDLPTTHYARLQWLKSIGIPVNPEIRLCNGADEVLGFYRDIQNKRSSLGYDIDGTVLKINDIALQNELGFISKAPRWAIAYKFPAQEELTLLNDVEFQVGRTGAITPVAKLEPVFVAGVTVSNATLHNGDEIERLNIAIGDTVVIRRAGDVIPQIIGVLHERRPDNAKPIIFPTNCPVCDSQIIRIEGEAVARCTGGLFCAAQRKEALKHFVSRKAMDIDGVGGKLIEQLVDRELIHTPADLFKLDLTTLTRLERMGAKSAENALNSLENAKSTTLARFIFALGIREVGEATALNLANHFKTLDTLKDANLEELQQVPDVGEVVANRIFIFWREAHNVAVVEDLIAQGVHWETVEVKEASENLFKDKTVVLTGTLTQMGRNEAKALLQQLGAKVSGSVSSKTDFVIAGDAAGSKLAKAQELNITVLTEEEFLAQMTR

SEQ ID NO: 2323 - DNA, 987 bp, Haemophilus influenzae
atggatttaaatacaattttgattattgtgggtatcgtggcacttgtcgccttaatcgtacacggattatggtcaaatcgtcgtgagaaatcaaaatatttcgataaagccaataaatttgaccgcacttctccaacatctagatcccatacgcaagaagaaatggtacagccaaacaatatttcgccaaatacctatgtggaaaatgggcatacaccaattcctcaaccgaccacagaaaaattaccatcagaagctgaattgatcgattatcgccaaagcgataaaagtgtggatgacatcaaaatttctattcctaacacgcaacctatttatgatatggggaatcatcgttccgagccaatacaaccaacgcaacctcaatacgatatgccaaccgcaaataatgttgcaagtatgaccttagaacaacttgaagcacaaagccgaaatattggttttaatggcattaattcatcatcgccagaattaagagtgcagcttgcagaattatctcacgaagagcatcaagtagactacaacgtctcgttcaatgaaccaaaagcaaaaacgacagctcagccaaaacaaacaactggctatattcaactttatcttattccaaaatctagcgaagaatttaatggtgctaaattggtgcaggctcttgaaaacttgggttttatcttgggtaaagatgaaatgtatcatcgtcacttagatttaagtgtggcaagtcctgtgctttttagtgtggcaaatttagaacaacccggcacattcaatgcttataacttagcggaatttaacaccataggaattgtattatttatgcaattgccctctccaggtaataatcttgctaatttacgtatgatgatgcgtgctgcccatacattagccgaagatttacaaggtgttatactgactgaagaacaagaaatttttgatgcaaatgcagagcaagcctatcttgctcgtgtgtaa

SEQ ID NO: 2324 - protein, 328 aa, Haemophilus influenzae
MDLNTILIIVGIVALVALIVHGLWSNRREKSKYFDKANKFDRTSPTSRSHTQEEMVQPNNISPNTYVENGHTPIPQPTTEKLPSEAELIDYRQSDKSVDDIKISIPNTQPIYDMGNHRSEPIQPTQPQYDMPTANNVASMTLEQLEAQSRNIGFNGINSSSPELRVQLAELSHEEHQVDYNVSFNEPKAKTTAQPKQTTGYIQLYLIPKSSEEFNGAKLVQALENLGFILGKDEMYHRHLDLSVASPVLFSVANLEQPGTFNAYNLAEFNTIGIVLFMQLPSPGNNLANLRMMMRAAHTLAEDLQGVILTEEQEIFDANAEQAYLARV

SEQ ID NO: 2325 - DNA, 819 bp, Haemophilus influenzae
atgttgaatcttaatgaattaaaatctggtttccattattttgtgatgggctggcatttcatcacacaaaaaggtttgcgtcggtttgttattatgccaattgtgcttaataccattttgctttgtggtttattttggctttttattagccaaatcagcagtgctattgattggatgatgaattttattccagattggcttagctttctcagtgtcattttactgacactttcgattttaacgattttattgctcttttattttacttttaccacgttttctggctttatcgccgcaccttttaatggtttgttggcggaaaaagtagaaaaaatgctgacgggggaaaatattaatgatgatggtctcgtggatataatgagggatgtgcctcgtatgcttgctcgagagtggcaaaaattacgttatagcctacccaaaattatcgccttatttttactgagttttattcctctggttgggcaaaccatcgtgccagtacttactttcttgttcacttgttggatgatggcaattcaatattgtgattatccttttgataatcacaaagtctcttttgatatcatgaaaaatgcacttggcaatcaacgaactcaaagtttaacttttggtggattggttacttgttgcacatttgtgcccgtgattaatttattaattatgcctgttgcagtatgtggtgcgacgctgatgtgggtggaaaattatcgtaatgacttaggttttaatatgaatagatctttttcctctcaaacggggcttgatgttcgttcagaaaatacagggattgttaaatag

SEQ ID NO: 2326 - protein, 272 aa, Haemophilus influenzae
MLNLNELKSGFHYFVMGWHFITQKGLRRFVIMPIVLNTILLCGLFWLFISQISSAIDWMMNFIPDWLSFLSVILLTLSILTILLLFYFTFTTFSGFIAAPFNGLLAEKVEKMLTGENINDDGLVDIMRDVPRMLAREWQKLRYSLPKIIALFLLSFIPLVGQTIVPVLTFLFTCWMMAIQYCDYPFDNHKVSFDIMKNALGNQRTQSLTFGGLVTCCTFVPVINLLIMPVAVCGATLMWVENYRNDLGFNMNRSFSSQTGLDVRSENTGIVK

SEQ ID NO: 2327 - DNA, 951 bp, Haemophilus influenzae
atgacaatttatgcagacaattcttattctatcggaaatacgccgcttgtgcgtttaaaacactttggccataacggcaatgtggtggtaaaaattgaaggtcgtaacccaagctacagcgtaaaatgccgtattggggcgaatatggtgtggcaagcagaaaaagatggcacgctcacaaaagggaaagagattgtagatgcaacgagtggtaacacgggcattgctttggcttatgttgcggcggctagaggttataaaatcacgctcaccatgccagaaacaatgagcctagaaagaaaacgtttattgctcggattgggtgtgaatttagtgcttaccgaaggcgcaaaaggaatgaaaggcgctattgcgaaagcagaagaaattgttgcttctgatccaagccgctatgtcatgcttaaacaatttgaaaatccagccaacccacaaattcatcgagaaacaacagggcctgaaatttggaaagatacggatggcaaagtcgatgttgttgttgctggcgtaggaacaggtggttcgattacgggtatttctcgcgcgattaaattagattttggtaaacaaatcacttctgttgccgttgagccagtggaatctccggtcattagtcaaactttagcgggtgaagaagtaaaaccaggtccacacaaaattcaaggtatcggtgcgggtttcattcccaaaaatttagatttatctattattgatcgcgtagaaactgttgatagtgataccgcacttgccacagctcgtcgcttaatggcggaagaaggcattcttgcaggtatttcatctggtgcagctgtcgcggctgcagatcgcttagctaaattaccagaatttgccgataaactcattgttgttattttgccttcagcttctgaacgctacttaagcacagcactgtttgaagggattgagggataa

SEQ ID NO: 2328 - protein, 316 aa, Haemophilus influenzae
MTIYADNSYSIGNTPLVRLKHFGHNGNVVVKIEGRNPSYSVKCRIGANMVWQAEKDGTLTKGKEIVDATSGNTGIALAYVAAARGYKITLTMPETMSLERKRLLLGLGVNLVLTEGAKGMKGAIAKAEEIVASDPSRYVMLKQFENPANPQIHRETTGPEIWKDTDGKVDVVVAGVGTGGSITGISRAIKLDFGKQITSVAVEPVESPVISQTLAGEEVKPGPHKIQGIGAGFIPKNLDLSIIDRVETVDSDTALATARRLMAEEGILAGISSGAAVAAADRLAKLPEFADKLIVVILPSASERYLSTALFEGIEG

SEQ ID NO: 2329 - DNA, 1224 bp, Haemophilus influenzae
atgacaaacaaagtaaacagttatggctggaaagccttaattggctctgccgtcggctatgcaatggacggtttcgatcttctcattttaggtttcatgcttagtgcaatttccgcagacttaaatctaacacccgcccaaggtggctctctcgtaacttggactctgattggtgccgtatttggcggcattttatttggtgcattaagcgataaatacggtcgtgtacgcgtactgacttggactattcttctttttgcggtgtttactggtttatgtgcgctcgcacaaggttactgggatttactgatttatcgcacaattgctggcattggcttaggcggtgaatttggaattgggatggctctagcagcggaagcatggcccgcacgccacagagctaaagcagcatcttatgttgcattgggttggcaagttggtgtgttaggtgctgcgttgcttacaccattattgctcccgcatattggctggcgtggaatgttcttagtgggtatcttccctgcatttgtcgcttggttcttacgttctcatctgcacgaacctgaaattttcacgcaaaaacaaaccgcactttcaacgcaatccagctttactgataaattacgttcattccagcttctgattaaagacaaagccacgagcaaaattagtcttggtatcgtcgtactcacttctgtacaaaacttcggttattacggcattatgatttggttacctaatttcttatcaaaacaacttggattcagtttaactaaatctgggctttggaccgccgttaccgtctgtggcatgatggctggcatttggattttcggacaactcgccgaccgcatcggacgcaaaccaagtttcttacttttccaattaggcgcagtgataagtatcgtggtttactcacaacttaccgatcctgacatcatgcttcttgctggggcatttttaggtatgtttgtgaacggaatgctgggcggttacggtgcattgatggcggaagcctacccaacagaagctcgagcaacggcacaaaacgtacttttcaatattggtcgtgccgtagggggatttggacctgtagttgtgggtgcagttgtacttgcttactctttccaaacggccatcgctctacttgcgattatctacgtaattgatatgttagcgacaattttcttaatccctgaattaaaaggtaaagccttagactaa

SEQ ID NO: 2330 - protein, 407 aa, Haemophilus influenzae
MTNKVNSYGWKALIGSAVGYAMDGFDLLILGFMLSAISADLNLTPAQGGSLVTWTLIGAVFGGILFGALSDKYGRVRVLTWTILLFAVFTGLCALAQGYWDLLIYRTIAGIGLGGEFGIGMALAAEAWPARHRAKAASYVALGWQVGVLGAALLTPLLLPHIGWRGMFLVGIFPAFVAWFLRSHLHEPEIFTQKQTALSTQSSFTDKLRSFQLLIKDKATSKISLGIVVLTSVQNFGYYGIMIWLPNFLSKQLGFSLTKSGLWTAVTVCGMMAGIWIFGQLADRIGRKPSFLLFQLGAVISIVVYSQLTDPDIMLLAGAFLGMFVNGMLGGYGALMAEAYPTEARATAQNVLFNIGRAVGGFGPVVVGAVVLAYSFQTAIALLAIIYVIDMLATIFLIPELKGKALD

SEQ ID NO: 2331 - DNA, 1041 bp, Haemophilus influenzae
atgaatattctaattattggcccatcttgggttggcgatatgatgatgtcgcacagtttgtaccagcaactgaaaattcaatatccaaactgcaatattgatgtgatggcaccgaattggtgtaagcctttgcttgcgcgaatgccagaggtgcgtaaggcgattgaaatgccattagggcacggagcctttgaattgggaacgcgttatcgtttaggaaagtctttgcgtgaacaatatgatatggcgattgttttgcctaattcattgaaatcggcgtttattcctttctttgcaaagattatccatcgtcgcggttggaaaggcgaaagccgttatattttattgaatgatttacgagccaataaaaaagattatccaatgatggtgcagcgttatgttgcattagcttttgaaaaagatgttataccaaaagctgatgatattcctgtcttgaaaccctatttgacggttgagccagcgcaacaagctgaaaccttaaaaaaatttgaaaaacaaaccgcacttttaggcgagcgtccaattattggtttttgtcctggtgcggaatttggcccagcaaaacgttggccacactatcattatgcaaaattagcagaaatgttaattacccaaggctatgctgtggcgctatttggttctgctaaagatgaaccagtgggcgaagaaattcgtcaagcactacctgaagagttgcgtgagttttgtgtcaatttagcaggaaaaaccaacttgaatgaagcggtggatttaattgcaaattgtacggcagtcgtgaccaatgacagtggtttaatgcatattgcggcagcagtcaatcgtccattgattgcactttatggcccaactagtccgcaatatacgccaccgctttcggataaggcaacgattattcgtttaattgaaggcggattaattaaagtccgtaaaggcgacaaagagggcggttatcatcaaagtttgattgatattacgccagaaatggcattagaaaaattgaacgaactgttggcaaaataa

SEQ ID NO: 2332 - protein, 346 aa, Haemophilus influenzae
MNILIIGPSWVGDMMMSHSLYQQLKIQYPNCNIDVMAPNWCKPLLARMPEVRKAIEMPLGHGAFELGTRYRLGKSLREQYDMAIVLPNSLKSAFIPFFAKIIHRRGWKGESRYILLNDLRANKKDYPMMVQRYVALAFEKDVIPKADDIPVLKPYLTVEPAQQAETLKKFEKQTALLGERPIIGFCPGAEFGPAKRWPHYHYAKLAEMLITQGYAVALFGSAKDEPVGEEIRQALPEELREFCVNLAGKTNLNEAVDLIANCTAVVTNDSGLMHIAAAVNRPLIALYGPTSPQYTPPLSDKATIIRLIEGGLIKVRKGDKEGGYHQSLIDITPEMALEKLNELLAK

SEQ ID NO: 2333 - DNA, 1164 bp, Haemophilus influenzae
atgacggaacaatactacaaaattgccctcttatttaatgcaaacaaagtatatgatcggcaggtggtggagggtattggacaatatattcaggcatcgcaatgtatgtgggatatttttgtagaagatgaatttatctatcatactgataccattaatcaactttctattgatggcattattgcagactttgatgatccaaaaactgttgaattattgcaacacactcttattcctactatagcagttggtggatcttataaacaagctgatttttatccgcactttccttatgtagcaacagataatatggcattggttgaaatggctttatctcatttacaggagaaaggactgtcacaatttgcattttatggtttgcaagtaaatactcataagcattggtctatagaacgaagagatgcttttgtagagttgatggagaaaaatcattaccctatttacctatatgagggtgtgcaggtgcatgctcaaaattggttggaagagcaacaaaagctaattgtctggttaaaatctcttccttctcatactggtattattgctgttacggatgcgcgtgctcgtcatttattgcaggcttgtgagtacagtaaaattgctgtacctgaagagctttgtgtggttggtattgataatgaagaattgatccaatatttatcgcgtatgtccctttcctccgtagaacaaggcacgagagagattggttatcaagctgcgaaattattacacaaattactcaatggtcaaaaagtttcacatacccctattttaattccaccgattaccgttcactctcgaaattctacagattatcgatcattaacagatccgcttgtcattcaagcaatgcattatattcgtcatcgtgcctgtcatcgaattaaagtagaacaagttttagatcatcttgaaacctcacgttctaatcttgaacaacgttttaagaatgaaatgaataaaacaattcaccaagtcatccacgaagaaaaaatttcccgagcaaagaatttattacaacaaacagatatttctattcaagaaattgctgagatttgcggctatccatcaattcaatatttttactctgtttttaagaaagaatttgaaatgactcctaaagagtttcgactaaattgttaa

SEQ ID NO: 2334 - protein, 387 aa, Haemophilus influenzae
MTEQYYKIALLFNANKVYDRQVVEGIGQYIQASQCMWDIFVEDEFIYHTDTINQLSIDGIIADFDDPKTVELLQHTLIPTIAVGGSYKQADFYPHFPYVATDNMALVEMALSHLQEKGLSQFAFYGLQVNTHKHWSIERRDAFVELMEKNHYPIYLYEGVQVHAQNWLEEQQKLIVWLKSLPSHTGIIAVTDARARHLLQACEYSKIAVPEELCVVGIDNEELIQYLSRMSLSSVEQGTREIGYQAAKLLHKLLNGQKVSHTPILIPPITVHSRNSTDYRSLTDPLVIQAMHYIRHRACHRIKVEQVLDHLETSRSNLEQRFKNEMNKTIHQVIHEEKISRAKNLLQQTDISIQEIAEICGYPSIQYFYSVFKKEFEMTPKEFRLNC

SEQ ID NO: 2335 - DNA, 1407 bp, Haemophilus influenzae
atgaaaaccactcatcgcacaagaatgccaacaacattagaagctttttcaccaatcattgtgatgctattactgttagggcttgggtatgctttatttgatttgccagcagagccattaatgattatttcaacggtatttgctggttttttagttattaaattaggtcattgctatttagatattttagacgccatttcagaaaaaatagctaaaacaatgcctgcgctattaattttaattactgtaggattattaattggaacttggattagtggaggaacaattcctatgatgatctactacggactaaaagcaatatcaccagaatatctttatgtgacagccttattccttactgctattgtttccatttgtactggaacctcttgggggtcagcagggactgttggtgtggcatttatgggagttgcgattggattagacgccaatttggctgctacggcaggtgctgtggtcgctggtgcgtattttggagataaattatcgccattatctgatacaaccaatattgcatccgcagctgctggcgtagatttatatgagcatatagttcacttactttatacaacattaccatcttttattctttcggctactgtctatgtggtatatggtttaaactacgatttttctaatgtagcgactccagaaaaagtaaatacaatgattcatgagttagagcaagtttatcattttaactttctattacttattccagtcgctattgtattatggggatctattactaagaaaccgactattccagtgatgttattatcagcatttatcgcaattattaatgctatcttaattcaaaaattctctctatctgatgtgattaatagtgcagttaatggatttgatacctcaatgattcaccatacttcagttagctctgatttaagtcgtttgttgaatcgtggtggaatgaactcaatgatgggaacactattaatttgtttctgtgcattgtcatttgcaggtgtattacaattgagcggtgcattaaccgtgattattcaaaaattactcacctttgttcattcaactctttctttgattattacaaccattctttgcggtctaacaatgattggggttacttgtaatgggcaaatttctattctaattccaggagaaatgcttaaaaatgcgtatgtagaaaaaggattacatccaaaaaatctaagtcgaacagcagaagactccgcaacaattattgaacctattttgccatggactgccgcaggtgcatatatggcaggcacattaggtgttgcaacattgtcttatttaccttgggcaattttatgttggagcggtattatctttgctattatttatggtgcaagtggaataggtattgcgaagctaaaaaaataa

SEQ ID NO: 2336 - protein, 468 aa, Haemophilus influenzae
MKTTHRTRMPTTLEAFSPIIVMLLLLGLGYALFDLPAEPLMIISTVFAGFLVIKLGHCYLDILDAISEKIAKTMPALLILITVGLLIGTWISGGTIPMMIYYGLKAISPEYLYVTALFLTAIVSICTGTSWGSAGTVGVAFMGVAIGLDANLAATAGAVVAGAYFGDKLSPLSDTTNIASAAAGVDLYEHIVHLLYTTLPSFILSATVYVVYGLNYDFSNVATPEKVNTMIHELEQVYHFNFLLLIPVAIVLWGSITKKPTIPVMLLSAFIAIINAILIQKFSLSDVINSAVNGFDTSMIHHTSVSSDLSRLLNRGGMNSMMGTLLICFCALSFAGVLQLSGALTVIIQKLLTFVHSTLSLIITTILCGLTMIGVTCNGQISILIPGEMLKNAYVEKGLHPKNLSRTAEDSATIIEPILPWTAAGAYMAGTLGVATLSYLPWAILCWSGIIFAIIYGASGIGIAKLKK

SEQ ID NO: 2337 - DNA, 1173 bp, Haemophilus influenzae
atgaataatttttataattttgatgtgattattgatcgcctaaatacatttagtgctaaatggaatgtagataatgatattattccaatgtctgttgcggatatggatattccagcccctcagataatgatagatgaattagaaaaatttaatcgtttaggaatttatggttatactgaattaccagccgactattacaaaataatcagtgattatattttcgaacaatatcattattctgttccctctgaaaaaattgtattttgcccaagaataatccaagccgtatctatttatatacgagcatttacaaaagaaactgatggaatatgtattctatcaccttcatatagtccaatattaaacacgataaaattaaatgacagaaaattatatcaatgccctttggtttatgaaaatagaaagtatcatattgattttcatttattagaggaatgttttaaacattctaaagtatttgttttaatttctcctcataatccaactggaacgatttggaataaagaagtccttattaaaattataaacttagctaaaaaacataatgtatttatcatttccgatgatgtccacgcagactttacactaacaaatgactcccactatttaatatcatcattagatgaatgggtagcaaatcactcaatgatctgtttatccccagcaaaaacttttaatattcctggattggaaatagctaacctaattattgagaataaagaaattcgagaaaaatttataaaagaaatgatggcattaggtatacataatccaaattatttctctataccagctatcatttcgttgtataaatattgtactgattgggtaatctatctaaaagaatacataaagaataataagaagatagtaaaagaatttttcaatgagtatattccattattagatattactgaaagtgatggaacttatttactttggataaactataaaaagctaagtataaatgaaaatgaattagcttattggattaataatttatcaagagtaaaagtatctttggggagtgaatttggcaaagagggagacggtttctttcgtatgaatgtcgctatgcctagagaaaaattattagaagcattgaatcgaatcaaaaatgggttttgtttattaaacaatagggagatttaa

SEQ ID NO: 2338 - protein, 390 aa, Haemophilus influenzae
MNNFYNFDVIIDRLNTFSAKWNVDNDIIPMSVADMDIPAPQIMIDELEKFNRLGIYGYTELPADYYKIISDYIFEQYHYSVPSEKIVFCPRIIQAVSIYIRAFTKETDGICILSPSYSPILNTIKLNDRKLYQCPLVYENRKYHIDFHLLEECFKHSKVFVLISPHNPTGTIWNKEVLIKIINLAKKHNVFIISDDVHADFTLTNDSHYLISSLDEWVANHSMICLSPAKTFNIPGLEIANLIIENKEIREKFIKEMMALGIHNPNYFSIPAIISLYKYCTDWVIYLKEYIKNNKKIVKEFFNEYIPLLDITESDGTYLLWINYKKLSINENELAYWINNLSRVKVSLGSEFGKEGDGFFRMNVAMPREKLLEALNRIKNGFCLLNNREI

SEQ ID NO: 2339 - DNA, 1128 bp, Haemophilus influenzae
atgtttaagttaaaatccgtaaatttacaagtttacattatgttaatagctattgcagtcattatggcattctttagtgttgctactgatggcgcttatttaagtgcaagaaatatttctaacttgttacgccaaacttcaattactggcattcttgcaattggaatggtttttgtcattatttctgctgaaattgacttatctgttggttcacttatgggcctactgggcggatttgcagctattgccgatgtttggtggggcttcccattacctgtaactattattgcaacaattgctcttggtttaatttttggtatttggaatggttggtgggtggcttatcgcaaagtgccatccttcattgttacacttgcaggttatctcgcattccgtggaattttgattggtttgactaatggcacaactgtatctcctattagtggaactatgacagttattgggcaaggttatttatcagatattgcaggggttatcttaggtggtattgcagttattggatttgttctttggggaaattatcaacgtagaagtcgccagcagcttcagctggaagtgtctgcattatcaaaagattttacgaaatatgctttgtttgcagtaattgtattaggagcaatttatttacttaatgattatcgtggcattccatttcctgttttagtactggcagttcttgcaatcttagggttattcctctctcgtaaaacttcattcggtcgccacgtttatgcgattggtggcaatattgatgcggcaaaattatctggtattaatgtagagaaaacaaaactgattatctttgcaatgaatggtgtgttagttgcaatagcagggttgattttaagtgctcgtttaggtgcaggatcaccatctgctgggcaaaatgcagaactagatgcgattgcagcttgtgtcattggaggggcaagcttagctggtggtgtaggaagtgtgtttggggtcgttattggtgcacttatcatcgcatcgcttgataatggtatgagtatgcttgatgtgccaactttttggcaatatattgtcaaaggtggcattttgttgcttgctgtatggatagatactagtaataagaaaaagatgtaa

SEQ ID NO: 2340 - protein, 375 aa, Haemophilus influenzae
MFKLKSVNLQVYIMLIAIAVIMAFFSVATDGAYLSARNISNLLRQTSITGILAIGMVFVIISAEIDLSVGSLMGLLGGFAAIADVWWGFPLPVTIIATIALGLIFGIWNGWWVAYRKVPSFIVTLAGYLAFRGILIGLTNGTTVSPISGTMTVIGQGYLSDIAGVILGGIAVIGFVLWGNYQRRSRQQLQLEVSALSKDFTKYALFAVIVLGAIYLLNDYRGIPFPVLVLAVLAILGLFLSRKTSFGRHVYAIGGNIDAAKLSGINVEKTKLIIFAMNGVLVAIAGLILSARLGAGSPSAGQNAELDAIAACVIGGASLAGGVGSVFGVVIGALIIASLDNGMSMLDVPTFWQYIVKGGILLLAVWIDTSNKKKM

SEQ ID NO: 2341 - DNA, 1512 bp, Haemophilus influenzae
atggcattgttggaaatgaaacatatcacaaaaaaatttggtgatgtgaccgcacttcataatatatccattgaattagaagcgggggaaattttatctttatgtggtgaaaatggatctggaaaatctacattaatgaaaatactttgcggtatttatccttgtggagattacagcggtgatatttacttttcagaaagtgaactaaaagcaaggaatattagagatactgaagaaaaaggcatttcaattattcatcaagaacttactctcgtaaagaatatgtctgtattggagaatatttttttgggtaacgaaataactcataaaggtttgacagcagataatgaaatgtacttacgttgcaaaaatttattacagcaggtgcaattagatgccgatcccaatacacgagtaggagaattaggtttagggcaacagcaattagttgaaatagctaaggctttgaataaacaagtaagacttcttatcttagatgaaccaacggcttcacttactgaaaaagaaacggaaattttgttaaatcttattaaggatcttaaagcacacaatatcgcttgtatctatatttcccataaactcaatgaagttaaggctatctctgacaaaatttgcgtcattcgtgatggtgaacatgttggtacgaaagacgcttcaaaaatgacagaagatgacattatcaccatgatggtaggtcgggaaattacctcactttatccacatgaacctcatgaaatcaaagatgaaattttacgagtagaaaatctctctgcttggcatccaatcaatacacatattaagcgtgttgataacgtaagttttagtcttcatgagggggaaattttaggtgttgcaggtttagttggttcaggtcgtacagacatggtgcaatgcttatttgggtcttatgaaggtaagtttgaaggaaatatttttatcaatcaaaaacaagtaaatatcaaaaattgtgcccaagcgattgaacataaaattgtgatggttcctgaagatcggaagaaacacggcattgtttccattatgggagttggtaaaaacattacgctttcttctttgaaatcttattgtttcggaaaaatggtagttaatgaagcaaaagaagagcaaataattggctcagccatcaaacgactaaaagtgaaaactttttcaccagatttgccaataggacgacttagtggcggtaatcaacagaaagcgattcttgcaaaatgtttattgttaaatcctaaaatactgattttagatgaaccaacaagaggaattgatgttggtgcgaaatatgaaatttataagttaattaaccaattagcacaagaagggattgctattattgtcatttcatcagaactaccagaagttttaggcattagtgatagagttcttgttatgcaccaaggtaaacttaaagctagccttatcaatactgctcttactcaagaacaagttatggaaacagcacttaaggagtaa

SEQ ID NO: 2342 - protein, 503 aa, Haemophilus influenzae
MALLEMKHITKKFGDVTALHNISIELEAGEILSLCGENGSGKSTLMKILCGIYPCGDYSGDIYFSESELKARNIRDTEEKGISIIHQELTLVKNMSVLENIFLGNEITHKGLTADNEMYLRCKNLLQQVQLDADPNTRVGELGLGQQQLVEIAKALNKQVRLLILDEPTASLTEKETEILLNLIKDLKAHNIACIYISHKLNEVKAISDKICVIRDGEHVGTKDASKMTEDDIITMMVGREITSLYPHEPHEIKDEILRVENLSAWHPINTHIKRVDNVSFSLHEGEILGVAGLVGSGRTDMVQCLFGSYEGKFEGNIFINQKQVNIKNCAQAIEHKIVMVPEDRKKHGIVSIMGVGKNITLSSLKSYCFGKMVVNEAKEEQIIGSAIKRLKVKTFSPDLPIGRLSGGNQQKAILAKCLLLNPKILILDEPTRGIDVGAKYEIYKLINQLAQEGIAIIVISSELPEVLGISDRVLVMHQGKLKASLINTALTQEQVMETALKE

SEQ ID NO: 2343 - DNA, 840 bp, Haemophilus influenzae
atgggtgcaaaagtgtttgtccaatctgcaaatggtgatgattcagcacaaatttctcaaatcgaaaatatgatcaataaaaatattgatgtattagtaattattcctcataacggtgaagtattaagtaacgttatttctgaagctaaaaaggaaggaataaaagtattagcgtatgaccgtttaatcaataatgcagatttagatttttatgtttcctttgataatgaaaaagtgggtgaactacaagctaaaagtattgtggctgtaaaaccagaaggtaattattttttaatggggggatctcctgtagataataatgcgaaattatttagaaaagggcaaatgaaagtattagatcctttaattgccagtgggaaaattaaggttgtaggagatcaatgggttgattcttggttagctgaaaaagcgttacaaattatggaaaacgcattaacagctaataaaaataatgtggatgctgttgttgcatctaacgatgctactgctggaggtgcgattcaagcccttagcgcacaaggcttatctgggaaagtcgcaatttctgggcaagatgcagatttagctgcaattaaacgtattgtcaatggctcgcaaactatgactgtttataaaccaattacgaaacttgcagataaagcggcagaaattgcggttgaattaggtaagaatgaaaaaatagaagctaatgcagaactgaataatggcttaaaaaatgttcctgcgtatttacttgatcctatcgctgttgataaacgtaatattaatgaaactgtaattaaagatggttttcatactaaggaaagtatttatcactaa

SEQ ID NO: 2344 - protein, 279 aa, Haemophilus influenzae
MGAKVFVQSANGDDSAQISQIENMINKNIDVLVIIPHNGEVLSNVISEAKKEGIKVLAYDRLINNADLDFYVSFDNEKVGELQAKSIVAVKPEGNYFLMGGSPVDNNAKLFRKGQMKVLDPLIASGKIKVVGDQWVDSWLAEKALQIMENALTANKNNVDAVVASNDATAGGAIQALSAQGLSGKVAISGQDADLAAIKRIVNGSQTMTVYKPITKLADKAAEIAVELGKNEKIEANAELNNGLKNVPAYLLDPIAVDKRNINETVIKDGFHTKESIYH

SEQ ID NO: 2345 - DNA, 1320 bp, Haemophilus influenzae
atgacaacctatttcgataaaattgaaaaaatctcctttgagggagaaaaatccacaaatccttttgctttcaaacattatgatgctaatcaagtaattttaggtaaaactatggctgaacatttacgcttggcggtgtgttattggcataccttttgctggaatgggaatgatatgtttgggctaggttctttggaacgaagttggcagaaaaatccaaatttgcttgctggcgcagaacaaaaagccgatattgcttttgagtttttgaataagttaggcgtgccttattattgttttcatgatgttgatattgcacctgaaggtaattcagtgcgggaatatgtacaaaattttcatcatattgttaatattttagaacgcaaacaagtagaaacgggtgtaaaactcttatggggaactgcaaattgttttactaatcctcgttatatgtctggtgcagcaaccaatcctaatcctgaggtttttgcttgggctgcaacacaagtgtttaatgcgatgaatgccactcaacgtttaggtggagaaaattacgtattatggggtggacgtgagggatatgaaactttattgaataccgatttgaaacgtgaacgtgaacaaattggtcgttttatgcaaatggtggtagaacataagcataaaattgggtttaaaggtacattattaattgagccaaaaccgcaagaaccaactaaacatcaatatgattatgatgtggcaacagtgtatggtttcctaaaacaatttggtttagaaaaagaaattaaagttaatattgaagctaaccacgcgacgcttgctggccatacctttcaacatgaaattgcaacagcttgtgcattagatatttttggctcaattgatgctaatcgtggcgatccacaattaggctgggataccgaccaattcccaaatagtgttgaagaaaatacgttagttatgtatgaaattttaaaacatggtggttttactactggaggttttaattttgatgcgaaaattcgccgacaaagtattgatccttatgatttattttacgctcatatcggtgcaattgatgtattggcattatccttaaaacgtgcagcaaaaatgttacaagaggaaaccttacaaaaaattgttaatgaacgctatgcaggttggaatagtgaacttggtcagcatattttgcaaggcaaaacttcacttgaaacacttgcgcaacttgtccaacaaaaagatttagcgccaaaaccagtttcaggtcagcaagaatatttggaaaatttggtaaaccaagttatttatagctaa

SEQ ID NO: 2346 - protein, 439 aa, Haemophilus influenzae
MTTYFDKIEKISFEGEKSTNPFAFKHYDANQVILGKTMAEHLRLAVCYWHTFCWNGNDMFGLGSLERSWQKNPNLLAGAEQKADIAFEFLNKLGVPYYCFHDVDIAPEGNSVREYVQNFHHIVNILERKQVETGVKLLWGTANCFTNPRYMSGAATNPNPEVFAWAATQVFNAMNATQRLGGENYVLWGGREGYETLLNTDLKREREQIGRFMQMVVEHKHKIGFKGTLLIEPKPQEPTKHQYDYDVATVYGFLKQFGLEKEIKVNIEANHATLAGHTFQHEIATACALDIFGSIDANRGDPQLGWDTDQFPNSVEENTLVMYEILKHGGFTTGGFNFDAKIRRQSIDPYDLFYAHIGAIDVLALSLKRAAKMLQEETLQKIVNERYAGWNSELGQHILQGKTSLETLAQLVQQKDLAPKPVSGQQEYLENLVNQVIYS

SEQ ID NO: 2347 - DNA, 1482 bp, Haemophilus influenzae
atgtatataggaattgattgtggcacacaaggaacaaaggcaatagtgcttgattctgtccaaaaaaaagtgattggagttggttacgcaaaacatgaattaattacacaatccaatggaagacgtgaacaacaaccaaattggtggattgaggcattacaacaagcattacaaattgcattgaaacaagcaaaaaattcaccgcacttttcacctaatttagtgaagggaataggcatttcagggcaacaacatggactggtaatgttagataaaaacgatcgtcctctatataaggctaagctttggtgtgatacagaaaccgctacggaaaatgatatactgatcgaaaaattaggcgggcaaacagccgtatttgaaaaattaggtatcatttgccaaactggttacacggcttcaaaactaagttggtttcgtcaaaattatcctgacaaatttgccaatattcgcaaaatcatgctgccacacgattatctaaattattggctaacaggaaaattctgcactgaatttggtgatgcttctggtagtggttatttcgatgttgtgaaaagagaatggaaaagagaagtcttcaaatatcttgcgccagaattaaatatggatgaagtgttaccaaaattactttctgctgaacaaaaaatcggtgtgattaaacctgaaattgcgactttatttggttttaatgagaatgtcatcgtctccacaggtggaggcgataatatgatgggagcaattggtacaggaaatattcgagaagggattgctacgatgagtctcggtacttctggtaccttgtatgcttatacgcaaaagccattacttaatttaccaccaatgatcgcaaatttttgttcaagtaataatggctggttaccactggtttgtgtgatgaatataacctcctcaaataaacagctaatgaatttgctcaatattgatattgaagaattaaatcaacttgctcaacaagcacctattggcgcgaatggcatcactattttgccattctttaatggtgaaagagttccacctttacccaatacaaaagcgagcattttaggattagattcaagtaatttcacacgagaaaatctttgtcgagcaatgatggaaagtgctacttttacgcttcgctatggcttagatttatttcgtcaagctggcctcgaaacctcacaaattcgcctaattggaggtggcgcgaaaagctcattttggcggcaaatgattgctgatgtgatgaattctgaagtggtatgtttgcaggaagaagaagctgctgcattaggaggagcaattcaagctatgtgggcaaatggagaaggagaactggaatttttatgcgaaaccttcattcacttagatgaaaactcaaaagcttatcccaacttatcacaggtgaaaaattatcaaagtgcttatgagcgttatttaacacatttatcacaattatattaa

SEQ ID NO: 2348 - protein, 493 aa, Haemophilus influenzae
MYIGIDCGTQGTKAIVLDSVQKKVIGVGYAKHELITQSNGRREQQPNWWIEALQQALQIALKQAKNSPHFSPNLVKGIGISGQQHGLVMLDKNDRPLYKAKLWCDTETATENDILIEKLGGQTAVFEKLGIICQTGYTASKLSWFRQNYPDKFANIRKIMLPHDYLNYWLTGKFCTEFGDASGSGYFDVVKREWKREVFKYLAPELNMDEVLPKLLSAEQKIGVIKPEIATLFGFNENVIVSTGGGDNMMGAIGTGNIREGIATMSLGTSGTLYAYTQKPLLNLPPMIANFCSSNNGWLPLVCVMNITSSNKQLMNLLNIDIEELNQLAQQAPIGANGITILPFFNGERVPPLPNTKASILGLDSSNFTRENLCRAMMESATFTLRYGLDLFRQAGLETSQIRLIGGGAKSSFWRQMIADVMNSEVVCLQEEEAAALGGAIQAMWANGEGELEFLCETFIHLDENSKAYPNLSQVKNYQSAYERYLTHLSQLY

SEQ ID NO: 2349 - DNA, 927 bp, Haemophilus influenzae
atgattatcgtaacaggcggtgctggttttattggcagcaatattgtcaaagcattgaatgatttaggacgcaaagatattttagtggtcgataacttaaaagatggcacgaaatttgcaaatttagttgatttagacattgcagattattgtgataaagaagatttcattgcttctattatttcggacgatgaatttggcgatattgatgcggtattccacgagggggcttgttctgcgactacggaatgggatggcaaatacattatgcacaacaactacgaatattctaaagagttattgcactattgccttgatcgcgaaattccttttttctatgcctcaagtgcggcaacttatggagacaccaaagtattccgtgaagaacgtgaatttgaaggcccattaaatgtgtatggctattctaaattcttgttcgatcaatatgtgcgtaacattttgccagaagcaaaatcgccagtatgtggtttccgttatttcaatgtttacgggccgcgtgaaaatcataaaggttctatggcgagtgtagcattccacttgaataaccaaatcttaaaaggcgaaaatccaaaattatttgcaggcagcgaacacttccgtcgtgattttgtttatgtgggtgatgtggctgcagtgaatatttggtgttggcaaaatggtatttcgggtatttacaaccttggtacaggaaatgcagaaagtttccgtgcggtggctgatgcggtagtgaaattccacggaaaaggcgagattgaaaccattccattcccagagcatttgaaatctcgttatcaagaatatactcaagcagatttaactaaacttcgctcaacaggctacgataaaccattcaaaacagtcgcggaaggcgtggctgaatatatggcgtggttgaatagaaaataa

SEQ ID NO: 2350 - protein, 308 aa, Haemophilus influenzae
MIIVTGGAGFIGSNIVKALNDLGRKDILVVDNLKDGTKFANLVDLDIADYCDKEDFIASIISDDEFGDIDAVFHEGACSATTEWDGKYIMHNNYEYSKELLHYCLDREIPFFYASSAATYGDTKVFREEREFEGPLNVYGYSKFLFDQYVRNILPEAKSPVCGFRYFNVYGPRENHKGSMASVAFHLNNQILKGENPKLFAGSEHFRRDFVYVGDVAAVNIWCWQNGISGIYNLGTGNAESFRAVADAVVKFHGKGEIETIPFPEHLKSRYQEYTQADLTKLRSTGYDKPFKTVAEGVAEYMAWLNRK

SEQ ID NO: 2351 - DNA, 504 bp, Haemophilus influenzae
atgaagattaaaaaattactcaagaatggattatccctctttttaacttttattgtgataactagcatactggattttgttcgtcgccctgtagtgccagaggaaataaataaaatcacgttacaagatcttcaagggaatacgttctctcttgaaagtcttgatcaaaacaaacccacattactttatttttggggaacttggtgtggttattgtcgttatacttcgccagcaattaattctttagcaaacgaaggctatcaagttgtatcggtggcattacgttcaggcaatgaggcggacgtaaatgattatttaagtaagcatgactaccacttcactacggttaatgatcctaaaggggaatttgcagaacgatggcaaattaatgtgacacccacaattgtgttgttgagtaaaggcaaaatggatcttgttacgaccggccttacgagttattggggattaaaagtgcggttgtttttcgcagagttttttggctaa

SEQ ID NO: 2352 - protein, 167 aa, Haemophilus influenzae
MKIKKLLKNGLSLFLTFIVITSILDFVRRPVVPEEINKITLQDLQGNTFSLESLDQNKPTLLYFWGTWCGYCRYTSPAINSLANEGYQVVSVALRSGNEADVNDYLSKHDYHFTTVNDPKGEFAERWQINVTPTIVLLSKGKMDLVTTGLTSYWGLKVRLFFAEFFG

SEQ ID NO: 2353 - DNA, 672 bp, Haemophilus influenzae
atgacatcaaatcaacttgctcaatatatcgatcacaccgcacttaccgcagaaaaaaatgaacaagatatttcgacactctgtaatgaagcgattgaacacggattttattctgtatgtatcaattcaggttatattccactcgctaaagaaaaacttgctggctcaaatgtaaaaatttgtaccgtagttggcttccctttgggggcgaatttaacctcaatcaaagcatttgaaacgcaagaatctattaaagcgggtgcaaatgagattgatatggtaattaatgtaggttggataaaatcgcaaaaatggaatgcagtaaaacaagatattcaagctgtatttaatgcttgtaatggcacgccattaaaagtgattttagaaacttgtttgctcactaaagatgaaatagtgaaagcctgtgaaatttgtaaagaaatcggcgtggcttttgttaaaacatcaacgggtttcaataaaggcggcgcagctgtagaagatgttgcattgatgaaacaaacggtcggcaatattggtgttaaagcatcaggtggtgtgcgtgatactgaaactgcacttgcaatgattaaggcgggtgcgactcgcattggtgcaagcgctggcattgcaattattagcggtactcaagacactcaaagcacttactaa

SEQ ID NO: 2354 - protein, 223 aa, Haemophilus influenzae
MTSNQLAQYIDHTALTAEKNEQDISTLCNEAIEHGFYSVCINSGYIPLAKEKLAGSNVKICTVVGFPLGANLTSIKAFETQESIKAGANEIDMVINVGWIKSQKWNAVKQDIQAVFNACNGTPLKVILETCLLTKDEIVKACEICKEIGVAFVKTSTGFNKGGAAVEDVALMKQTVGNIGVKASGGVRDTETALAMIKAGATRIGASAGIAIISGTQDTQSTY

SEQ ID NO: 2355 - DNA, 1530 bp, Haemophilus influenzae
atgtcccttgctattgtttacagccgtgcttctatgggtgtgcaagcaccgctagtcactattgaggtgcatttaagcaacggaaaaccaggatttacacttgttggtttgccagaaaaaaccgtgaaagaggcacaagatcgggtgcgtagtgcgttgatgaatgcacaatttaaatacccagccaagcgtatcacagtgaatctcgcccctgcggatttaccgaaagaaggcggaagatttgatttgcctattgctatcgggattttagctgcatcggatcagcttgatgcgagccacttaaagcaatttgaatttgtggctgagcttgcgctaacgggacaattgcgtggcgtacatggtgtgatccccgctattcttgcagcacaaaagtcaaagcgagagttaattattgcgaaacaaaatgctaatgaagcctcgctcgtgtctgatcaaaatacttattttgctcaaacgcttttagatgtagtgcaatttctcaatggtcaggaaaaattaccactcgccactgaaattgtgaaagaaagtgcggtaaatttttcaggtaaaaatacgttagatttaacggatattatcggacaacagcacgctaaacgagcattgaccattgccgcagcggggcagcataatttgctctttcttggcccaccgggtacagggaaaaccatgttagccagccgtttgacagggcttttgcctgagatgacagatttagaagcgatagaaacagcatctgtaacgagtttagttcaaaacgagttaaattttcataattggaagcaacgtccttttcgcgcaccacatcatagtgcatcaatgccagctttagttggtggtgggacgatccctaaacctggcgaaatatccttagcaacaaatggggtactttttcttgatgaacttccagaatttgagcgaaaagtgttagatgcactacgtcagcctttggaaagtggtgagattattatttctcgtgccaatgccaaaattcaatttccagctcgttttcaattagtcgcagcgatgaatccaagccccacaggtcattatactggaacacataaccgcacttcaccccagcaaattatgcgttatttgaatcgactttcagggccatttttagatcgttttgatttgtctattgaagtgcctttattgccacaaggcagcttacaaaatacgggcgatcgtggtgaaactagcgcacaagtacgtgaaaaagtgttaaaagtgcgtgagattcaaatggaaagagcgggaaaaattaacgcttatttgaatagtaaagagattgagcgtgattgcaagttaagtgataaagatgcctttttccttgaaaatgcgctgaataaactggggctttctgttcgggcttatcatcgtattttgaaagtttctcgaaccattgctgatctgcaaggagaacaacaaatttctcaaccgcacttagcggaggccttgggctatcgagcaatggatcgtttgctgcagaaattgtcgaatatgtaa

SEQ ID NO: 2356 - protein, 509 aa, Haemophilus influenzae
MSLAIVYSRASMGVQAPLVTIEVHLSNGKPGFTLVGLPEKTVKEAQDRVRSALMNAQFKYPAKRITVNLAPADLPKEGGRFDLPIAIGILAASDQLDASHLKQFEFVAELALTGQLRGVHGVIPAILAAQKSKRELIIAKQNANEASLVSDQNTYFAQTLLDVVQFLNGQEKLPLATEIVKESAVNFSGKNTLDLTDIIGQQHAKRALTIAAAGQHNLLFLGPPGTGKTMLASRLTGLLPEMTDLEAIETASVTSLVQNELNFHNWKQRPFRAPHHSASMPALVGGGTIPKPGEISLATNGVLFLDELPEFERKVLDALRQPLESGEIIISRANAKIQFPARFQLVAAMNPSPTGHYTGTHNRTSPQQIMRYLNRLSGPFLDRFDLSIEVPLLPQGSLQNTGDRGETSAQVREKVLKVREIQMERAGKINAYLNSKEIERDCKLSDKDAFFLENALNKLGLSVRAYHRILKVSRTIADLQGEQQISQPHLAEALGYRAMDRLLQKLSNM

SEQ ID NO: 2357 - DNA, 618 bp, Haemophilus influenzae
atgtctgaaattaaacttaattaccacaaaactcactttttaacgagcgcgccgaatattcgttccattcctgaagatacgggcattgaaattgcgtttgcgggtcgttcaaatgcaggaaaatcaactgcacttaatgcattaaccaatcaaaaaagcttagctcgcacctcaaaaacgccagggcgtactcaactaatcaacttatttgaagtggaaccaaattgtaaattggtggatttaccgggctatggttatgctgccgtgccagagcagatgaaaattcaatggcaaaaatccttaggcgaatatttacaaaaacgcgaatgtttggcagggttagttgtgttgatggatattcgccatccgcttaaagatcttgaccaacaaatgattgaatgggcggtttcagcaaatttaccggtacttttattacttactaaagccgataaattgagccaaagtgcacgtagtaaacaagtaaaaatggtgcgtgaagcaattcttccatttcaaggcgatatacaagttgaggctttttctgcacaaaataaaattggtattgataaattggcggcgaaattagatttttggttttcgccactttttgcgaaataa

SEQ ID NO: 2358 - protein, 205 aa, Haemophilus influenzae
MSEIKLNYHKTHFLTSAPNIRSIPEDTGIEIAFAGRSNAGKSTALNALTNQKSLARTSKTPGRTQLINLFEVEPNCKLVDLPGYGYAAVPEQMKIQWQKSLGEYLQKRECLAGLVVLMDIRHPLKDLDQQMIEWAVSANLPVLLLLTKADKLSQSARSKQVKMVREAILPFQGDIQVEAFSAQNKIGIDKLAAKLDFWFSPLFAK

SEQ ID NO: 2359 - DNA, 867 bp, Haemophilus influenzae
atgacaacaaaaacaacttaccaatggcctcaatctaaggatatttatccatatcgaccagggcgttttgatgcaccaaaacattggcgttataacttacgtagctttttaaatcgtggttcaattcgtcgctttgaacaatttatcaatcaacatccttttctcgtcgatatttttaatacgcacttggattatagttatcctgttgcttgtcgttttttagataagcgttttaacgcatcacaacgttttcatgccgtttgtgagaatcttttatttttacccgaaaaacttaccgcactttctacgccgttatgggaaaaacctctaagttttggcgaagtcattcctgattttgaaatgacattaagcatgacaacccatcaaccgatggaggggtattgggtattggagctatggcataaaccaagaaatgaattagtttatttgcttacttttgccaaattaggcgatgcgttgcttattgctgttgtacaagggccaaattttgaaggctcaaaggaaatggtgaaacaactaaccaaattatgccacggtttacgccctgcctatttaatggttgaaaccatgaaatcactcacaaaaatactagactacgataaattgcttggcattccgcaaaaataccaaaataaatctcgcttcattcaaagtaaacaatacacagtggactatgatgcaatttttggcgaatcaggcggagaattaaaagattactgggaattgcctttagaaatggatagaaatctggatgatattccaagtaaaaaacgttccatgtatcgtaaacgttatgcgatgctagatgatttggctaaggtaattgaagaaaagttaggattgtaa

SEQ ID NO: 2360 - protein, 288 aa, Haemophilus influenzae
MTTKTTYQWPQSKDIYPYRPGRFDAPKHWRYNLRSFLNRGSIRRFEQFINQHPFLVDIFNTHLDYSYPVACRFLDKRFNASQRFHAVCENLLFLPEKLTALSTPLWEKPLSFGEVIPDFEMTLSMTTHQPMEGYWVLELWHKPRNELVYLLTFAKLGDALLIAVVQGPNFEGSKEMVKQLTKLCHGLRPAYLMVETMKSLTKILDYDKLLGIPQKYQNKSRFIQSKQYTVDYDAIFGESGGELKDYWELPLEMDRNLDDIPSKKRSMYRKRYAMLDDLAKVIEEKLGL

SEQ ID NO: 2361 - DNA, 999 bp, Haemophilus influenzae
atgacagtctcaaacaacaaagaattactccttgaagtcaatcacttaggcgtcagttttaaaattaaaaatgataaatcccttttcttcgccaaaccgcaaaccttaaaagcggtgaaggatgtgtcttttaaactttacgcaggtgaaactctcggcgtagtaggtgaatctggttgtggtaaatccacacttgcacgcgctattatcggtttagtcgaagcgagtgaaggggaaatcttgtggcttggtaaacatttacgaaaacaatcagcgaaacaatggaaagaaacgcgtaaagatattcaaatgattttccaagatccgctcgcctctctcaatccgcgaatgaatattggcgaaatcattgctgagccattaaagatctaccaaccgcacttaagtgccgccgaagtgaaagaaaaagtgcaagctatgatgttgaaagttgggcttttaccgaacttgattaaccgctacccacatgaattttctggtggtcaatgtcagcgtatcggtattgctcgtgcgttaatcattgagcccaaaatgatcatttgtgatgagcccgtttcagcgttagatgtgtcgattcaggctcaagtggtgaatttattgaaatccctgcaaaaagaaatggggctttccttaatttttatcgcccatgatttagcggtggtaaaacatatttctgaccgcgtattagtgatgtatttaggcaatgcaatggaattaggcagcgatgtggaagtatataacgataccaaacatccttataccaaagccttaatgtctgctgttccgatccccgatccaaaattggaacgcaataaatccatcgaattacttgaaggtgatttgccttcgccaattaatccaccgtctggttgcgtatttcgtactcgctgtctaaaggctgatgagaattgtgcgaaacaaaaaccacctttcaccagccaaaacaacagccattttgtggcttgcttgaaagtcttataa

SEQ ID NO: 2362 - protein, 332 aa, Haemophilus influenzae
MTVSNNKELLLEVNHLGVSFKIKNDKSLFFAKPQTLKAVKDVSFKLYAGETLGVVGESGCGKSTLARAIIGLVEASEGEILWLGKHLRKQSAKQWKETRKDIQMIFQDPLASLNPRMNIGEIIAEPLKIYQPHLSAAEVKEKVQAMMLKVGLLPNLINRYPHEFSGGQCQRIGIARALIIEPKMIICDEPVSALDVSIQAQVVNLLKSLQKEMGLSLIFIAHDLAVVKHISDRVLVMYLGNAMELGSDVEVYNDTKHPYTKALMSAVPIPDPKLERNKSIELLEGDLPSPINPPSGCVFRTRCLKADENCAKQKPPFTSQNNSHFVACLKVL

SEQ ID NO: 2363 - DNA, 972 bp, Haemophilus influenzae
atgaatcctttattagatgtaaaaaatctctacgttcgcttcaaaacaccagatggcgtcgttacagcagtgaatgacttaaacttcacgctgaatgcaggaagcacgctgggcattgtaggcgaaagtggatcaggcaagtcacaaacagcctttgctttaatgggtttattggcagccaacggtgaagtggaaggctctgccatttttgaagggaaagaattagttaatttaccgaatgctgaattgaataaaatccgcgccgagcaaatttccatgattttccaagatccaatgacgtcactcaacccatacatgaaaatcggtgaacaactcatggaagtgctgcaattgcacaagggctatgataaacaaactgcctttgccgaatccgtgaaaatgttagacgcagttaaaatgccagaagctaaaaaacgcatgggcatgtatccgcacgagttttctggcggtatgcgtcaacgggtgatgattgcgatggccctattatgccgtcccaaactactcattgcagatgaaccaacaaccgctttggatgtgaccgttcaagcacaaatcatgaccttgttaaatgagttaaaacacgaatttaatactgcgattattatgattacccatgatcttggggtagtggctggtatctgcgatcaagtcatggtgatgtatgctggacgaaccatggaatacggcacagcggaacaaattttctatcatccaacccatccctattccataggcttaatggatgcgattcctcgcttagacggcaatgaagaacacttggtcaccattcctggcaatccaccgaatttattgcatttgccaaaaggttgtccattctcacctcgttgccaatttgctaccgaacaatgccaaattgcgccaaaactgactacatttaatcacggtcaattacgtaattgttggttatcagcggagaaatttaacctatga

SEQ ID NO: 2364 - protein, 323 aa, Haemophilus influenzae
MNPLLDVKNLYVRFKTPDGVVTAVNDLNFTLNAGSTLGIVGESGSGKSQTAFALMGLLAANGEVEGSAIFEGKELVNLPNAELNKIRAEQISMIFQDPMTSLNPYMKIGEQLMEVLQLHKGYDKQTAFAESVKMLDAVKMPEAKKRMGMYPHEFSGGMRQRVMIAMALLCRPKLLIADEPTTALDVTVQAQIMTLLNELKHEFNTAIIMITHDLGVVAGICDQVMVMYAGRTMEYGTAEQIFYHPTHPYSIGLMDAIPRLDGNEEHLVTIPGNPPNLLHLPKGCPFSPRCQFATEQCQIAPKLTTFNHGQLRNCWLSAEKFNL

SEQ ID NO: 2365 - DNA, 936 bp, Haemophilus influenzae
atgacagattatcgtactcagccgattaatcagaaaaatgcggattttgtggaacaagtggctgaccgtattgaagaaatgcaactggaaggccgcagcctatggcaagatgcgaaacgccgttttttccgcaacaaagcggccgttgtcagtctgattattttggcgtttattattatatttatcaccgtagcgccttggttcttcccatttacctatgaagataccgattggaatatgatgagcgccgcaccaacaatggaaggctatcacttcttcggtaccgatgcctcaggtcgagacttgttggtacgtactgctatcggtggacgtatttcattattggtcggtattgctggtgctttcatttccgtgactatcggcacaatttatggggctatttccggttatgtaggcggtaaaacagatatgctgatgatgcgctttttggaaattcttagctcatttccatttatgtttttcgtgattttgttggtgaccctttttggccaaaacattttcttaatttttatcgctatcggggccattgcctggcttggtcttgcacgtattgtacgcggacaaaccctcagcctaaaaaataaagaattcgtcgaagccgccatcgtttgtggcgtacctcgtcgccaaatcattttgaaacacattattccgaatgtattaggcttagtggcagtttatgcctcgcttgaagtgcctgggctcattctatttgaatcattcttaagcttcttaggattaggtacacaagagccgatgagtagttggggcgcactcttaagtgatggtgctgcacaaatggaagtgtcgccttggttattaattttcccggcatttttcctttgccttaccctattttgttttaactttatcggtgacgggttgcgtgatgcgctcgatccgaaagatagatag

SEQ ID NO: 2366 - protein, 311 aa, Haemophilus influenzae
MTDYRTQPINQKNADFVEQVADRIEEMQLEGRSLWQDAKRRFFRNKAAVVSLIILAFIIIFITVAPWFFPFTYEDTDWNMMSAAPTMEGYHFFGTDASGRDLLVRTAIGGRISLLVGIAGAFISVTIGTIYGAISGYVGGKTDMLMMRFLEILSSFPFMFFVILLVTLFGQNIFLIFIAIGAIAWLGLARIVRGQTLSLKNKEFVEAAIVCGVPRRQIILKHIIPNVLGLVAVYASLEVPGLILFESFLSFLGLGTQEPMSSWGALLSDGAAQMEVSPWLLIFPAFFLCLTLFCFNFIGDGLRDALDPKDR

SEQ ID NO: 2367 - DNA, 921 bp, Haemophilus influenzae
atgttcaagtttatttttaaacggctgttggaagccttgccgacgctgtttattttgattactttttctttctttttgatgcgtctcgcccctggcagccccttcacttctgaacgcgcttatccgccagaagtcatggctaatatcgaagcgaagtatcatttaaatgaaccattatataaacaatatttcctttatttagaaaatctttccaaaggagattttggtccctcttttaaatataaagaccaatcagtcaatgatttaatcgcgtcagctttccctgtttccataaaattgggcatggtggccttcgcctttgcagtcgtgctaggagtaacagcaggtacgctcgccgctctgaatcaaaatagccgttgggattatattttgatgagtttctcgatgcttggggtcattatgccaagcttcgtatttgcacctattttagtgctaattttcgccatttatctaggatggctgccagctggcggttggaacggcggtaccgccatatacatgatcttacctgtagcctccttaactatcgcttatgttgcagggattgcgcgtatcatgcgtggttcgatgattgaagtgttacattccaactttattcgaaccgccaaagctaaaggactttccatgtcgagaatcattttaaaacatgctttgcgtcccgcacttttacccgtgataacctatttaggacctgctttcgtagggattattaccggctcaatggtcatcgaaagcgtatttggtttacctggcatgggattattatttgtaaacggcgcattgaaccgcgattactctttagttttgagcctcaccattttagtggggacattaaccattttatttaatgcgattgtggatattttatacgccatcatcgatccaaaaattcgttattaa

SEQ ID NO: 2368 - protein, 306 aa, Haemophilus influenzae
MFKFIFKRLLEALPTLFILITFSFFLMRLAPGSPFTSERAYPPEVMANIEAKYHLNEPLYKQYFLYLENLSKGDFGPSFKYKDQSVNDLIASAFPVSIKLGMVAFAFAVVLGVTAGTLAALNQNSRWDYILMSFSMLGVIMPSFVFAPILVLIFAIYLGWLPAGGWNGGTAIYMILPVASLTIAYVAGIARIMRGSMIEVLHSNFIRTAKAKGLSMSRIILKHALRPALLPVITYLGPAFVGIITGSMVIESVFGLPGMGLLFVNGALNRDYSLVLSLTILVGTLTILFNAIVDILYAIIDPKIRY

SEQ ID NO: 2369 - DNA, 1626 bp, Haemophilus influenzae
atgcaacacaaactactcttctctgcaatcgctcttgctctttcctattctgcgcaagcagttatagtgcctgaaggaacacaattagatgaaaaacagcatatcgtcatcaataatggggctgaaccacaaagttttgacccacacaaaaccgaaggtgtgccagaatctaacgttgcttatcaattacttgaaggcttagtcacctcagactctgaaggtaaacttcaaccgggtgtggctgaaagctgggaaaatacacctgacttcaaaacctggacattccatttacgtaaagatgctaaatggtcaaacggagatcctgttactgcacacgatttcgtgtttgcgtggcgtcgcttagtggatcctgccactgctgcaccttatgcgagttacttaagttatttacaagttgaaaatgcgcaagacattattgacggtaagaaaaaaccggctgaattaggcgtggaagcaaaagatgattacacctttgtggttcatgcaatcaatcctgtgccttatgcagtcagtttaacgactcaccaatccttattgccattaccacaaaaagtagtcgaaaaattgggtgatgcatgggtgaaaaaagaaaactacgtgggtaacggtgcttataagttggctaaccacatcattaacgaaaaaatcgaatttgaacgtaacccactttattggaacgataaagaaaccgtaatcaatagcgcgacattcctcgccattgaaaacccaagtaccgatgtagcgcgttatcgtgcgggcgatttagacatgaccagttatggtttaccgccagaacaattcgctaaattacaaaaagaattgccaggcgaagtatacgttactcgtaccctaggaacttattcttatgaattaaacaataagaaagcaccttttgataacgtgaatattcgtaaagccttgaacttatcccttgatcgtaatgtgatcaccgataaagtattgggccaaggtcaaacaccaacctatgtgtttactccaacttacatcgaagaaggccatctcattcaacaacctgcttattcaaaagaaccgatggcacaacgtaatgaagaagccattaaactcttagaagaagctggttacagtaaagcgaatccgttgaaattcagcattctttataataccaatgaaaaccataaaaaagtggctattgctgcagcatctatgtggaaagcgaacaccaaaggtttgattgatgtgaaattagaaaaccaagagtggaaaacttacattgatagccgtcgtgcaggtcgttacgatgcggcacgcgcaggatggagtgcggattacaaccaagcaacaacattcggcaactatttcttatctaattctagtaacaatactgcgaaatacgcaaatccagaatatgataaagcgatggcagaatcttacgcagcaactgatgcagagggtcgtgcaaaagcttatgcgaaagccgaagaaattcttgcaaaagattacggtatcgtaccaatctttaactatgtgaatccacgcttagtgaaaccttacgtaaaaggttattcaggcaaagatccacaagatcatatttacttacgcaatctttatattattaaacattaa

SEQ ID NO: 2370 - protein, 541 aa, Haemophilus influenzae
MQHKLLFSAIALALSYSAQAVIVPEGTQLDEKQHIVINNGAEPQSFDPHKTEGVPESNVAYQLLEGLVTSDSEGKLQPGVAESWENTPDFKTWTFHLRKDAKWSNGDPVTAHDFVFAWRRLVDPATAAPYASYLSYLQVENAQDIIDGKKKPAELGVEAKDDYTFVVHAINPVPYAVSLTTHQSLLPLPQKVVEKLGDAWVKKENYVGNGAYKLANHIINEKIEFERNPLYWNDKETVINSATFLAIENPSTDVARYRAGDLDMTSYGLPPEQFAKLQKELPGEVYVTRTLGTYSYELNNKKAPFDNVNIRKALNLSLDRNVITDKVLGQGQTPTYVFTPTYIEEGHLIQQPAYSKEPMAQRNEEAIKLLEEAGYSKANPLKFSILYNTNENHKKVAIAAASMWKANTKGLIDVKLENQEWKTYIDSRRAGRYDAARAGWSADYNQATTFGNYFLSNSSNNTAKYANPEYDKAMAESYAATDAEGRAKAYAKAEEILAKDYGIVPIFNYVNPRLVKPYVKGYSGKDPQDHIYLRNLYIIKH

SEQ ID NO: 2371 - DNA, 447 bp, Haemophilus influenzae
  misc_feature 424, 425, 426, 427, 428: n is any nucleotide
atgacaacacagttagattcacttcgtaatatgaccgtcgtcgtagctgatactggcgatattgatgcaatcaaaaaataccaaccacaagatgcaacaacaaacccatctttaattttaagtgcttcagaattaccacaatacgccccattaattgatgaagcggtagcttatgcaaaagctcaaagtgcagacaaagcacaacaattaattgatgctgaagataaattagcggtaaacatcggcttagaaattttaaaaattgttccaggacgcatttcaactgaagtggatgcgcgtctttcttacaacacacaagcaacggttgaaaaagcgcgtaaattaatcgcactttataatgcagcaggcatttcaaatgatcgtattttgattaaaatcgcttccacatggcaaggtatccgannnnncattccattcattaattaa

SEQ ID NO: 2372 - protein, 148 aa, Haemophilus influenzae
  VARIANT 142, 143: Xaa is any amino acid
MTTQLDSLRNMTVVVADTGDIDAIKKYQPQDATTNPSLILSASELPQYAPLIDEAVAYAKAQSADKAQQLIDAEDKLAVNIGLEILKIVPGRISTEVDARLSYNTQATVEKARKLIALYNAAGISNDRILIKIASTWQGIRXXIPFIN

SEQ ID NO: 2373 - DNA, 438 bp, Haemophilus influenzae
  misc_feature 4, 5, 6, 7, 8: n is any nucleotide
atgnnnnnttcgccatttgtaggtcgtattttagactggtacaaagcaaactccgacaaaaaagaatatgcgccagcagaagatccaggcgttatttcggtcaccaaaatctacaattactacaaagaatatggctacaacacagttgtgatgggcgcaagtttccgtaatgtaggcgaaattactgaacttgcaggttgcgatcgcttaaccattgcaccagcattactgaaagaattacaagaaaattcaaccgcacttgtacgcaaattagaatacaaaggcgaagtaaaagcgaaaccacaaccattaacagaagctgagttctactggcaacataacagcgatgctatggctgttgaaaaattagcagagggtattcgtaaatttgctgttgaccaagaaaaattggaaaccatgctttcagcaaaactttaa

SEQ ID NO: 2374 - protein, 145 aa, Haemophilus influenzae
  VARIANT 2, 3: Xaa is any amino acid
MXXSPFVGRILDWYKANSDKKEYAPAEDPGVISVTKIYNYYKEYGYNTVVMGASFRNVGEITELAGCDRLTIAPALLKELQENSTALVRKLEYKGEVKAKPQPLTEAEFYWQHNSDAMAVEKLAEGIRKFAVDQEKLETMLSAKL

SEQ ID NO: 2375 - DNA, 1587 bp, Haemophilus influenzae
atgttatggtttttcttttgtgtagccgtgttgattatcggttactttatttatggaaaaattatcgaaaaaatttttgtgattaatccaaaacgtcaaacacctgcttaccaagtaaatgatggtgtggactatatgccaatgtctaaaacgaaaatttggctaattcaattgttaaatattgcgggaacaggccctatttttggccctattcttggtgcattatatggacctgttgcaatgctttggattgttattggttgtatttttgctggcgcagtacacgattatttctgtggtatgttaagtattcgtcacggtggcgcaacaatgccatatttggcgggtaagtttttaggtcgtcccgttaaagtctttatcaatacattagcacttgtgttgcttttacttgtcggtgttgtgtttgtggcaagcccagctcaattgatgggtaccattacaatggatgtatttggtgtttcgcaaggtgcgttagtgcttggtgatgcagaggcagttcatcattctgttgaagctggtgggattaaagtatggggaatggataaagcaacagtggttgctctgtggacagcaattatttttgcttattatattcttgcaaccttacttccagttgataagattattggtcgaatttatccactctttggtgcgttattactctttatgtcagttggtatggtatacggattagttgtttcacattttagtgcaacagatccaattgagtttttccgtacaatcaatgctgatggcgagggtttaacttgggcgaaatttacacaaaatttccaagtgaaaggtgatgttccaatttggccacttttattcttaactatctcttgtggcgcattatcaggtttccacgcaacgcaaactccattaatggcgcgttgtacagaaaatgaaagtgaaggtcgcttcattttctacggtgcaatgattactgagggggtaattgcattagtatggtgtatggttggtcttgcattctatgaaaatccacaagcgttacaagatgcaatttcagcaggttctccatctaaagttgtgtatgatagttcgttacatttcttaggttttattggtggtatttttgccatattaggcgtgattgttcttcctattacttctggcgatactgcattccgtgctgcgcgtttacagatagccgaaatttttaatgttgatcaacgttcattacctaaacgtttattaattgctgtgccgttgtttgtattaggttattttatttcaaccattgatttcagcgtattatggcgttatttcacttgggcaaaccaaatgacagcaatggtaatgttatggactgcagcgggatatttatatcgttatcataaattccactgggttgcgtctcttcctgcgtggtttatcacaacagtatgtgcaacttatttgttctacaacaaaattggtttcggcttagattatcagctttctgtgtatcttggtttagcaacaaccatcgtttgtatcgtattgttcttcacaatgcttaaaccattaggtgcgcgagatgaagaagcttatataaataattag

SEQ ID NO: 2376 - protein, 528 aa, Haemophilus influenzae
MLWFFFCVAVLIIGYFIYGKIIEKIFVINPKRQTPAYQVNDGVDYMPMSKTKIWLIQLLNIAGTGPIFGPILGALYGPVAMLWIVIGCIFAGAVHDYFCGMLSIRHGGATMPYLAGKFLGRPVKVFINTLALVLLLLVGVVFVASPAQLMGTITMDVFGVSQGALVLGDAEAVHHSVEAGGIKVWGMDKATVVALWTAIIFAYYILATLLPVDKIIGRIYPLFGALLLFMSVGMVYGLVVSHFSATDPIEFFRTINADGEGLTWAKFTQNFQVKGDVPIWPLLFLTISCGALSGFHATQTPLMARCTENESEGRFIFYGAMITEGVIALVWCMVGLAFYENPQALQDAISAGSPSKVVYDSSLHFLGFIGGIFAILGVIVLPITSGDTAFRAARLQIAEIFNVDQRSLPKRLLIAVPLFVLGYFISTIDFSVLWRYFTWANQMTAMVMLWTAAGYLYRYHKFHWVASLPAWFITTVCATYLFYNKIGFGLDYQLSVYLGLATTIVCIVLFFTMLKPLGARDEEAYINN

SEQ ID NO: 2377 - DNA, 456 bp, Haemophilus influenzae
atgtttcgtggtgcaacggcggttaatttagattctaagggacgtgtagcgatcccaactcgctatcgcgctgaaattcttgaaaagaaccaagggcaaatggtttgtactgtagatattcgccaatcctgtcttttactttatccccttgatgaatgggaaaaaatcgaacaaaaacttctcgcactttctaactttgatcctacccaacgccgtttgcagcgagtaatgcttggccatgccactgaatgtgagatggatgctcagggtcgtattttgcttagtgggccattacgccaacacgcaaaattagaaaaaggtttaatgttggtagggcaacttaataaatttgaaatttggagcgatgtagaatggcatactcaaattgcagaggatatagaaattggctccagcgcagattttgctgctgatgcgttaaatgatttctcattatag

SEQ ID NO: 2378 - protein, 151 aa, Haemophilus influenzae
MFRGATAVNLDSKGRVAIPTRYRAEILEKNQGQMVCTVDIRQSCLLLYPLDEWEKIEQKLLALSNFDPTQRRLQRVMLGHATECEMDAQGRILLSGPLRQHAKLEKGLMLVGQLNKFEIWSDVEWHTQIAEDIEIGSSADFAADALNDFSL

SEQ ID NO: 2379 - DNA, 966 bp, Haemophilus influenzae
atgaatagcgaaaattccttttcttcatctgaacatattacagttttacttcacgaagccgtgaatggcttggcattgaaggagaatggcatttatattgatggtacttttgggcgtggggggcattctcggtttatcctttctcaactttcttctaatggtcgtttgatagctgtagatcgcgatcctcgtgctattgcagaagcacacaaaatacaagactcgcgttttcagattgaacataacagcttttcgcatattcctgaaatttgtgacaaattaaatttagtgggcaaaattgacggtattttgcttgatcttggtgtatcttcccctcagcttgatgaagcagaacgtggttttagttttatgaaagatggcccgcttgatatgcgtatggatacaactcaaggtttatctgctgaagaatggttaaaacaagtgtccattgaggatttaacttgggtgttgaaaacttttggcgaagagcgtttcgctaaacgtattgccactgctattgttgatttcaataaaagtgcggtaaaaaatggcacagaatttttatcacgtaccagtcaattggcggaacttatttcacaggcagttccttttaaagataaacataaacatcctgcgacgcgtagtttccaagctattcgtatttttattaattcggaattagatgaattagaaagtctgcttaattctgcgttagatatgttagcaccagaaggtcgtttatcaattattagtttccattctttagaagatagaatggtgaaacattttatgaaaaaacaaagtaagggcgaggatattcccaaaggtttaccattgcgagaagatcaaattcagcgtaatcaaaaattaagaattattggtaaagccattcagccaagtgatgcagaaattcaagcaaatcctcgttcaagaagtgccatattacgtgtggcagagagaatttag

SEQ ID NO: 2380 - protein, 321 aa, Haemophilus influenzae
MNSENSFSSSEHITVLLHEAVNGLALKENGIYIDGTFGRGGHSRFILSQLSSNGRLIAVDRDPRAIAEAHKIQDSRFQIEHNSFSHIPEICDKLNLVGKIDGILLDLGVSSPQLDEAERGFSFMKDGPLDMRMDTTQGLSAEEWLKQVSIEDLTWVLKTFGEERFAKRIATAIVDFNKSAVKNGTEFLSRTSQLAELISQAVPFKDKHKHPATRSFQAIRIFINSELDELESLLNSALDMLAPEGRLSIISFHSLEDRMVKHFMKKQSKGEDIPKGLPLREDQIQRNQKLRIIGKAIQPSDAEIQANPRSRSAILRVAERI

SEQ ID NO: 2381 - DNA, 324 bp, Haemophilus influenzae
atgtctgaaaataataagcctcgttatccgttacagcagattttagtcgaagatttattttcttcaaataagttagtggtgttgctgttaatagggattttagtttctgcaatgggaacgatttggataacccataaaactcgccaattaatttctgaaaatggaatgttaattttacagcgtcaagcacttgagaatgaataccgtaatttacaagtgcaggaagctacggaaggggatagcacgcgtgtagaatctattgcgattagtacattaaaaatgaaagttgtttcttcagagcaagaagttgaaattagagaataa

SEQ ID NO: 2382 - protein, 107 aa, Haemophilus influenzae
MSENNKPRYPLQQILVEDLFSSNKLVVLLLIGILVSAMGTIWITHKTRQLISENGMLILQRQALENEYRNLQVQEATEGDSTRVESIAISTLKMKVVSSEQEVEIRE

SEQ ID NO: 2383 - DNA, 1833 bp, Haemophilus influenzae
atggtgaaatttaattcctcgcgtaaatcaggtaagtcaaaaaaaacaattagaaaattgaccgcacctgaaactgtaaagcaaaacaagtctcaaaaggtgtttgaaaaatgctttatgcgtggacgttatatgctttctacggttcttattttactcggtctgtgtgctttagtcgcacgagcagcttatgttcaatctattaatgccgatacgttatcaaatgaagcggataagcgttctttgcgtaaagatgaagtattatcggtgcgtggttctattttagatcgtaatggtcagcttttatctgtaagcgtgccgatgagcgcgattgtggcagatccaaaaacgatgttgaaggaaaattcgcttgcggataaagaacgaattgcagctttagccgaagaattaggtatgactaaaaatgatttagtgaaaaaaattgagaaaaattctaaatctggttatttgtatttagcacgtcaagttgaattaagtaaagctaactatattcgtaaattaaaaattaagggtattattttagaaacagagcatcgccgtttttatcctcgtgtagaagaagctgcacacgtggtgggttatacggatattgatggaaatggtattgaaggcattgagaaaagttttaattccctgcttgttggtaaagacggttcacgtactgttcgtaaagataaacgaggaaatattgttgaacatatctccgatgagaaaaaatatgatgcacaagatgttaccttaagtatcgatgaaaaattgcaatctatggtgtatcgtgagattaaaaaggcggtgtctgagaataatgcagaatctggtactgcggtgttagttgatgttcgtactggggaagtgttagctatggcgactgcgccctcttataatccaaacaaccgtgtcggcgtgaaatcagagttaatgcgtaaccgtgcaattaccgatacttttgagccaggttctacggtaaaacctttcgttgttttaaccgcacttcaacgaggtgtcgttaaacgagatgaaattattgatactacgtcctttaaattaagcggtaaagaaattgtggacgtagcaccacgtgctcagcaaactttagacgagattttaatgaactctagtaaccgtggtgtaagtcgtcttgcactacgtatgccacctagtgcattaatggaaacttatcaaaatgcaggtttaagtaaaccgacagatttaggcttgatcggagaacaagttgggattttgaatgcaaatcgtaaacgctgggcagatattgagcgtgcaacagtcgcttatggttatggtattactgcgacacctttacaaattgctcgtgcctatgcaacccttggtagtttcggtgtttatcgtccgctttctatcactaaagttgatccgccagttattgggaaacgggttttctctgaaaaaataactaaagatattgtgggaattttagagaaagtagcaattaaaaataaacgcgcaatggtggaaggctaccgtgtcggcgtaaaaacaggtacggcacgtaagattgaaaatggacattatgtaaataagtatgtggcatttactgcgggtattgcaccaattagtgatcctcgttatgcattagtggttttgatcaatgatccaaaagcaggagaatattatggtggtgcggtttctgcccctgtattctctaacattatgggctatgcgttacgtgcaaatgctattccgcaagatgctgaagcagctgaaaacacaacaacgaaaagtgcaaaacgtattgtttatattggcgaacacaagaatcaaaaagtgaattaa

SEQ ID NO: 2384 - protein, 610 aa, Haemophilus influenzae
MVKFNSSRKSGKSKKTIRKLTAPETVKQNKSQKVFEKCFMRGRYMLSTVLILLGLCALVARAAYVQSINADTLSNEADKRSLRKDEVLSVRGSILDRNGQLLSVSVPMSAIVADPKTMLKENSLADKERIAALAEELGMTKNDLVKKIEKNSKSGYLYLARQVELSKANYIRKLKIKGIILETEHRRFYPRVEEAAHVVGYTDIDGNGIEGIEKSFNSLLVGKDGSRTVRKDKRGNIVEHISDEKKYDAQDVTLSIDEKLQSMVYREIKKAVSENNAESGTAVLVDVRTGEVLAMATAPSYNPNNRVGVKSELMRNRAITDTFEPGSTVKPFVVLTALQRGVVKRDEIIDTTSFKLSGKEIVDVAPRAQQTLDEILMNSSNRGVSRLALRMPPSALMETYQNAGLSKPTDLGLIGEQVGILNANRKRWADIERATVAYGYGITATPLQIARAYATLGSFGVYRPLSITKVDPPVIGKRVFSEKITKDIVGILEKVAIKNKRAMVEGYRVGVKTGTARKIENGHYVNKYVAFTAGIAPISDPRYALVVLINDPKAGEYYGGAVSAPVFSNIMGYALRANAIPQDAEAAENTTTKSAKRIVYIGEHKNQKVN

SEQ ID NO: 2385 - DNA, 1467 bp, Haemophilus influenzae
atgaaaaaactcaccgcactttttaatttgcctgaattaaagaatgatatagaactccataatatggtgttagatagccgtaaggttaaagctggcgatctttttgtggcgataaaaggtcatcaggtggatggaaatcaatttattgattctgctcttcattctggtgcgagtgcggtggtttctgagacagaattatctagcgagcatttaactgtagagtttattgggaatgttcccgtagtgaaatatcatcaactttcacgtcatctttcgtccttagctgatgttttttatgattcgccctctaaaaatttaacccttgttggtgttacaggaacaaatggcaaaaccactatttctcaattattagcgcaatgggtggaattattggggcatcgtgcggctgtgatgggaaccattggtaatggactttttgggcaaattgtagaagctaaaaatacgacaggttcagcagtagaaattcagtcatctctttcaactttcaaacacgcaggtgcagattttacctctattgaagtttcatcacacggtttggcgcagcatcgtgtagaagccttgcattttaaagcagcaattttcacaaatttaacccgtgatcatctagattatcatcaatctatggaaaattatgctgcagcgaagaaacgcttgttcactgaattagatacccaaattaaagtgattaatgctgatgatgaaattggataccaatggctaactgaactacctgatgctattgccgtaagtatgaatgcggattttaaagtaggttcacaccaatggatgaaagcaataaatatccattatcattttaaaggtgcagatattacttttgaatctagctggggtaatggtgttttgcatagcccattaattggtgcttttaatgtaagtaatttattattagtaataaccacgttgttatcgtttggttacccattggaaaatttactcgctacggcgaaatctttaaaaggagtatgtggaagaatggaaatgattcaatatccaaataaaccaaccgttattgtagattatgcgcatacaccagatgcgttagaaaaagcgttgattgctgcgcgtgaacattgccaaggcgaattatggtgcatttttggttgtggcggagaccgtgatagaggcaaacgtccgttaatggcacaggttgcagagcagtttgctgaaaagattattgtgacaaaagataatccacgaacagaaccacaaagccaaattgaagcagatattgtcgctggctttaaaaatatggaaaaagtggggattattcctgatcgcgcacaggcaatccagtttgcgattgaaagtgcggtagaaaatgacgtgattttaattgctggaaaggggcacgagcattatcaaattattggttcggaagttgtgcatttttccgaccaagaaattgcacttgatttcttaaaataa

SEQ ID NO: 2386 - protein, 488 aa, Haemophilus influenzae
MKKLTALFNLPELKNDIELHNMVLDSRKVKAGDLFVAIKGHQVDGNQFIDSALHSGASAVVSETELSSEHLTVEFIGNVPVVKYHQLSRHLSSLADVFYDSPSKNLTLVGVTGTNGKTTISQLLAQWVELLGHRAAVMGTIGNGLFGQIVEAKNTTGSAVEIQSSLSTFKHAGADFTSIEVSSHGLAQHRVEALHFKAAIFTNLTRDHLDYHQSMENYAAAKKRLFTELDTQIKVINADDEIGYQWLTELPDAIAVSMNADFKVGSHQWMKAINIHYHFKGADITFESSWGNGVLHSPLIGAFNVSNLLLVITTLLSFGYPLENLLATAKSLKGVCGRMEMIQYPNKPTVIVDYAHTPDALEKALIAAREHCQGELWCIFGCGGDRDRGKRPLMAQVAEQFAEKIIVTKDNPRTEPQSQIEADIVAGFKNMEKVGIIPDRAQAIQFAIESAVENDVILIAGKGHEHYQIIGSEVVHFSDQEIALDFLK

SEQ ID NO: 2387 - DNA, 1374 bp, Haemophilus influenzae
atgattaaactctctactgtacaacttgcacagattcttcaagctaaattaattggcgatgaaaatgtgcaagttgaagaaattaatacggatactcgaaaaagcgtatcaaatagcttattttttgctttaaaaggcgaaaaatttgatgctcatcaatatcttgatcaagcggtagcacaaggtgcggtagccgttgttgttcagcaagaaaattcttccatttctattcctcagctggtggttaaggatactcgaattgctttaggcgaacttgcaaaatggttacgtgagaaaattaatccacgtactgtggcgatgaccggctcttctggtaaaactacggtaaaagaaatgacagcaagtattttgcagcataccgcagcagattcagaagcggtactttttaccaatggtaacttcaataacgatataggtgtgcctttaactctgcttcgcttaacagaaaaacatcgttttgctgtgattgaacttggtgcaaatcatcaaaatgaaatcaattacaccacaaaattagttcaacctaatgccgcattgattaataatattgcgcccgcacatttagaggggtttggttctttagcgggggttgttcaagcaaaaggcgagatttatcgaggtttaacaaaaaatggtgtggcgattatcaatgctgaacataatcacttagatatttggcaaaaagaaattagtaatcacgccattcaatatttcaacggcaaggactattccgtcaaaaatgttcaaggtaacgaacaaggttcaacctttacgttagtttctccgcaaggcgaaattgatattagtttgccttatcttggagagcataatgtaaaaaatgctttagctgctaccgcactagcgatgaatgttggtgctacgcttgccgatgtcaaagctggattagaacaacgttcacaagtgaaagggcgtttatttcctattcaagtaacgcctaatttattgttattagatgatacttataacgcaaataaagattctctctgtgcggctattgatgtcctaaaaagttatgatgctttccttattctatgtgtcgcagatatgaaagaattgggcgaaaattctctcgctattcatcgtgaagtaggacaatatgttaatttggtaaatttagatttggtgtgttcttatggcaatgaaagtgcggttatttctgaggctgttttgggtaagcattttacggataaaactgaaatggtggatttcttagttccacttattgaaaaccaattacaacaaaataaaaaagttgtggtgctgggaaaaggctcacgctcaatgaaaatggaagatgtgatctattcattaaaggataaaattaaatgttag

SEQ ID NO: 2388 - protein, 457 aa, Haemophilus influenzae
MIKLSTVQLAQILQAKLIGDENVQVEEINTDTRKSVSNSLFFALKGEKFDAHQYLDQAVAQGAVAVVVQQENSSISIPQLVVKDTRIALGELAKWLREKINPRTVAMTGSSGKTTVKEMTASILQHTAADSEAVLFTNGNFNNDIGVPLTLLRLTEKHRFAVIELGANHQNEINYTTKLVQPNAALINNIAPAHLEGFGSLAGVVQAKGEIYRGLTKNGVAIINAEHNHLDIWQKEISNHAIQYFNGKDYSVKNVQGNEQGSTFTLVSPQGEIDISLPYLGEHNVKNALAATALAMNVGATLADVKAGLEQRSQVKGRLFPIQVTPNLLLLDDTYNANKDSLCAAIDVLKSYDAFLILCVADMKELGENSLAIHREVGQYVNLVNLDLVCSYGNESAVISEAVLGKHFTDKTEMVDFLVPLIENQLQQNKKVVVLGKGSRSMKMEDVIYSLKDKIKC

SEQ ID NO: 2389 - DNA, 1083 bp, Haemophilus influenzae
atgttagtctggcttgctgaatatcttgttcgttacgaaaccgcttttaatgctatttcttatattaccgtccgcgcaattcttgcattattaaccgcactttttatctcactttggattggccctaaagtgatcaaacgtttacagatcttaaaatttggccaagaagtgcgaaatgatggccctgaaagtcactttgcaaaaaaaggcacacccactatgggcggtgtgatgattttattctctattggcgtaagtacgttattatgggcaaatcttgctaatccttatatttgggtttgtttatttgttttatttggatacggcgcaattggttttgtggatgatttccgtaaaattacccgtaaaaatacagatggtttaattgctcgttggaaatatttctggatgtctgtggtggcattagtggcaatcctttggctttattggcttggtcacgacactgatgccacccgtttagtgattccattctttaaagacattatgcctcaattaggtttgttctatattgtgttatcttactttgtgattgttggcacgggtaatgcagtgaatttaaccgacggtttagatggattagcgattatgcctactgcgcttgttgcaggtgcgtttgctttaattgcttgggctacaggtaacgtgaatttcgcagaatatttgcacattccgtatattaaatacagttctgaagtagtggtgttctgtacagctattgttggcgcgagtttgggattcttatggtttaatacttatccagctcaagtatttatgggggacgtgggttctctagcattaggtggcgcgctgggtgtcgtagcaattcttgttcgtcaggaatttttgcttgtgataatgggtggcgtatttgttgttgaagcgctctctgttattttgcaagtagggtcttataagttacgcaaacaacgcatttttagaatggcaccgattcatcatcattttgaattgaaaggatggccagaaccaagagtgattattcggttttggattatttccttaatgttagtgttgatgggattagtcaccttgaagttgcgttaa

SEQ ID NO: 2390 - protein, 360 aa, Haemophilus influenzae
MLVWLAEYLVRYETAFNAISYITVRAILALLTALFISLWIGPKVIKRLQILKFGQEVRNDGPESHFAKKGTPTMGGVMILFSIGVSTLLWANLANPYIWVCLFVLFGYGAIGFVDDFRKITRKNTDGLIARWKYFWMSVVALVAILWLYWLGHDTDATRLVIPFFKDIMPQLGLFYIVLSYFVIVGTGNAVNLTDGLDGLAIMPTALVAGAFALIAWATGNVNFAEYLHIPYIKYSSEVVVFCTAIVGASLGFLWFNTYPAQVFMGDVGSLALGGALGVVAILVRQEFLLVIMGGVFVVEALSVILQVGSYKLRKQRIFRMAPIHHHFELKGWPEPRVIIRFWIISLMLVLMGLVTLKLR

SEQ ID NO: 2391 - DNA, 1314 bp, Haemophilus influenzae
atgaatgcctatcaaaacaaaaatattacgatcattgggcttggcaaaacaggtctttcttgtgtggattatctcttatcccaacaggctaatattcgtgtgattgatacccgaaaaaatcctactggtattgataaacttcctaaaaatatccctcttcatactggtagtttaaatcaggaatggttacttgaaagcgatatgattgttattagcccaggacttgcggtaaaaacaccagaaattcaaaccgcacttaaagcgggagtggaagtaataggcgacattgaattattctgccgtgcggcgacaaagccaattgtggggattacaggttcaaatggaaaaagtactgtaacgactttagtttatgaaatggcgaaagctgctggcgtaaaagttggtatgggtggaaatattggcattcccgctttgtcattgttgaatgaagattgtgaactttatgtactcgagctgtctagttttcaacttgaaacaacttacagcttaaaagctgcggctgcaactgttttgaacgtgactgaagatcatatggatcgctatgtggatttagaagattatcgccaagcaaaattacgtatttatcataatgctgaggtcggagttttaaataatgaggataagctgacttttggtgaaggcgaaaatcaagcgaaacaaaccgtttcttttgcggaaaatagtgcagattattggctaaaaacggaaaacggcaagcaatatttaatggcaaaagatgaagtaattttgccttgtgaagaagtaacattagtcggtcgccataattatatgaacattttggcagcaacagcattggcacaagctgtcggtattaatttagatgcaattcgtaccgcactttgtcatttcaaaggattagatcatcgtttccaattagcgcatcaagccaatggtgttcgttggattaatgattctaaagcgacaaatgtaggcagcactgttgctgcattggctgggctttatgttgagggtaaattgcatttgttgctaggtggagacggaaaaggggctgatttttcagaattagctgaattaattaatcagccacagattatttgttattgttttggtcgagatggtgcgcagcttgcaaaactttcatcacaaagccatttgtttgaaacaatggaacaagccatagcatttttacgcccaatattgcaaagcggagatatggtattattgtcgcctgcttgtgcaagtctcgatcagtttgcatcttttgaaaagcgcggcgaagaatttactcgtttagctcaatgttcagcctaa

SEQ ID NO: 2392 - protein, 437 aa, Haemophilus influenzae
MNAYQNKNITIIGLGKTGLSCVDYLLSQQANIRVIDTRKNPTGIDKLPKNIPLHTGSLNQEWLLESDMIVISPGLAVKTPEIQTALKAGVEVIGDIELFCRAATKPIVGITGSNGKSTVTTLVYEMAKAAGVKVGMGGNIGIPALSLLNEDCELYVLELSSFQLETTYSLKAAAATVLNVTEDHMDRYVDLEDYRQAKLRIYHNAEVGVLNNEDKLTFGEGENQAKQTVSFAENSADYWLKTENGKQYLMAKDEVILPCEEVTLVGRHNYMNILAATALAQAVGINLDAIRTALCHFKGLDHRFQLAHQANGVRWINDSKATNVGSTVAALAGLYVEGKLHLLLGGDGKGADFSELAELINQPQIICYCFGRDGAQLAKLSSQSHLFETMEQAIAFLRPILQSGDMVLLSPACASLDQFASFEKRGEEFTRLAQCSA

SEQ ID NO: 2393 - DNA, 1185 bp, Haemophilus influenzae
atggaatttttacaaaacatcaaaaaaaattacgatgaatggacacgcatcacacctcaaggtttgttgtatgatcgcgcgctattttggttatttgttattttgcttttaattggtttaattgcagtaacatctgcatctattccttatagctctcgattgtttaatgatcctttttattttgcaaaacgcgatgctatttatgtgctactttctttgctaacttgttatatttcattacatatttcttcttcgcaatgggaaaaatggcacgctaaaattttcttattttccgtcatattattattgcttgttccctttattggtacatcggttaatggtgcaaaacgttggatttcattggggatcttaaactttcaacctgcagaatttgcaaaattagcactcacttgttttttagcaagctattttactcgtcgttatgatgaagtgcggtcacgacatgttagtatttttaaaccgcttattgttatgcttgtattaggttgttttcttttattacaacctgatttaggtagtacagtcgtgttatttattattatgtcaggaatgctttttatcgtgggggcaaaaattttacagtttgtaggattaatcgctctaggaggcattttattcgtttggcttgtattgacagcttcttatcgcctcaagcgatttacaggttttttagaaccctttaaagatccttatggtacgggatttcaactaacaaattctcttatagcgtttggtcgaggagaaattactggagaaggattaggtaattcaattcaaaaattagattatctgcctgaagcacataccgatttcattatggcgattatcggcgaagaatttggatttatcggtatatttattgttattcttttattaggtttattaatttttcgtgcaatgaaaattggacgagaatccttaatgttagaacaacgttttcgaggtttttttgcattaggtattggtttttggattttctttcaaggctttgttaatttaggtatggcacttggaatgttaccaactaaaggtttaacctttccgctcgtgagttatggtggttcgagtattatcattatgtccgccaccattggtattttattacgaattgatcacgaaaatcgtttatttcgtataggtcaagcacgcttgcgtgatgattag

SEQ ID NO: 2394 - protein, 394 aa, Haemophilus influenzae
MEFLQNIKKNYDEWTRITPQGLLYDRALFWLFVILLLIGLIAVTSASIPYSSRLFNDPFYFAKRDAIYVLLSLLTCYISLHISSSQWEKWHAKIFLFSVILLLLVPFIGTSVNGAKRWISLGILNFQPAEFAKLALTCFLASYFTRRYDEVRSRHVSIFKPLIVMLVLGCFLLLQPDLGSTVVLFIIMSGMLFIVGAKILQFVGLIALGGILFVWLVLTASYRLKRFTGFLEPFKDPYGTGFQLTNSLIAFGRGEITGEGLGNSIQKLDYLPEAHTDFIMAIIGEEFGFIGIFIVILLLGLLIFRAMKIGRESLMLEQRFRGFFALGIGFWIFFQGFVNLGMALGMLPTKGLTFPLVSYGGSSIIIMSATIGILLRIDHENRLFRIGQARLRDD

SEQ ID NO: 2395 - DNA, 1056 bp, Haemophilus influenzae
atgaaaaagaaaaaattattagtgatggcgggtggtactggtggtcatatttttcctgcgattgcggttgctcaaactttgcaaaaacaaggatgggatatttgctggttaggcacgaaagatagaatggaagctcagcttgtaccaaagtatgctattcctattcgatttattcaaatttctggcttgcgtggtaagggcataaaggctttatttaacgcgccttttactattcttcgtgcggtgttgcaggcaaaaaaaattattcaagaagaaaagcctgacgctgtacttggtatggggggctatgtttcgggtcctgctggcgtagcggcaaaactttgtggtgtaccaataattttacatgaacaaaatgcgattgcgggtttaacgaacaaattattaggtaaaattgcaagctgtgtattgcaggcatttccaaccgctttttctaatgctgaagtggtaggaaaccccgtccgagaagatttatttgagatgccaaatcctgatattcgtttctcggatcgtgaggaaaaattacgtgtcttagttgttggtggtagccaaggggcgagagtacttaatcatactttgcccaaagtggtggcgcagcttgcagataaattagagattcgtcatcaagtaggcaaaggtgcggtagaagaagtcagccaactttatggcgagcatcaagagaaagttaaagtcacagaatttattgataatatggcagaggcttatgcttgggctgatgtggtgatttgccgttctggcgcattaaccgtatgtgaaattgcagcagtgggagccgcagcaatttttgtacccttccaacataaagatcgccaacaatatttaaatgcgaaatatttatcagatgttggcgcggcgaaaattatagaacaggcagatttaacgcctgaaattctagtgaattctttaaaaaatttcactcgtgaaaatttattgcagatggcattgaaagcgaaaacaatgtcgatgcctaatgcggcacaacgtgtagctgaagtaattaaacaatattcaaactag

SEQ ID NO: 2396 - protein, 351 aa, Haemophilus influenzae
MKKKKLLVMAGGTGGHIFPAIAVAQTLQKQGWDICWLGTKDRMEAQLVPKYAIPIRFIQISGLRGKGIKALFNAPFTILRAVLQAKKIIQEEKPDAVLGMGGYVSGPAGVAAKLCGVPIILHEQNAIAGLTNKLLGKIASCVLQAFPTAFSNAEVVGNPVREDLFEMPNPDIRFSDREEKLRVLVVGGSQGARVLNHTLPKVVAQLADKLEIRHQVGKGAVEEVSQLYGEHQEKVKVTEFIDNMAEAYAWADVVICRSGALTVCEIAAVGAAAIFVPFQHKDRQQYLNAKYLSDVGAAKIIEQADLTPEILVNSLKNFTRENLLQMALKAKTMSMPNAAQRVAEVIKQYSN

SEQ ID NO: 2397 - DNA, 1428 bp, Haemophilus influenzae
atgaaacattcccacgaagaaattagaaaaattatccctgaaatgcgccgtgtacagcaaattcatttcattggcattggtggtgcgggaatgagcggcattgcagaaattttattaaatgaaggttatcaaatttcaggttcagatattgccgatggcgtagtcactcaacgtttagctcaagctggggcaaaaatctacattggtcatgcagaagaacatattgaaggtgccagtgttgttgttgtgtctagtgcgataaaagatgataaccctgaattagtcgcatcgaaacaaaaacgcattccagtgattcaacgcgcacaaatgttggcggagattatgcgttttcgtcacggtattgctgttgcaggaacacacgggaaaacgacaacaacagcaatgatttcaatgatttacacccaagctaaacttgatccgacttttgtaaatggtggtttagtgaaatcggcgggtaagaatgcacatttaggggcaagtcgttatttaattgccgaagccgatgaaagtgatgcgtcgtttttgcatttacagccaatggtatctgttgtaactaatatggagccagaccatatggatacttacgaaggcgattttgaaaaaatgaaagccacttatgtgaaattcctgcataatttaccattctatggtttagccgtgatgtgcgctgatgatcctgttttaatggaacttgtgccaaaagttggtcgccaagtgattacatatggttttagtgagcaggcagattatcgcattgaagattatgaacaaacaggttttcaaggtcattacacagtgatttgcccaaataatgaacgtattaatgtgttgctcaatgttcctggaaaacataatgcattaaatgcaacggctgcacttgctgtagcaaaagaagagggtattgctaacgaggcaattttagaggctctggctgattttcagggggctggtcgtcgctttgatcagttaggtgagtttattcgtccaaatggtaaagtgcgtttagttgatgattatggtcatcatccaacagaagtagacgtaaccattaaagcagcgcgagaaggctggagagataaacgtattgtaatgattttccaaccgcatcgttattcgcgcactcgtgatttgtttgatgattttgtacaagtgctttcgcaagtagacgctttgattatgcttgatgtgtacgcagcgggagaagcccctattgttggcgctgacagtaaatctctttgccgttccattcgtaatcttggtaaagttgatcctattttggtatcagatacttcgcaactaggcgatgttctcgatcaaattattcaagacggcgatttgattttggcacaaggtgcgggtagcgtaagtaaaatttctcgtggcttggctgaatcttggaagaattaa

SEQ ID NO: 2398 - protein, 475 aa, Haemophilus influenzae
MKHSHEEIRKIIPEMRRVQQIHFIGIGGAGMSGIAEILLNEGYQISGSDIADGVVTQRLAQAGAKIYIGHAEEHIEGASVVVVSSAIKDDNPELVASKQKRIPVIQRAQMLAEIMRFRHGIAVAGTHGKTTTTAMISMIYTQAKLDPTFVNGGLVKSAGKNAHLGASRYLIAEADESDASFLHLQPMVSVVTNMEPDHMDTYEGDFEKMKATYVKFLHNLPFYGLAVMCADDPVLMELVPKVGRQVITYGFSEQADYRIEDYEQTGFQGHYTVICPNNERINVLLNVPGKHNALNATAALAVAKEEGIANEAILEALADFQGAGRRFDQLGEFIRPNGKVRLVDDYGHHPTEVDVTIKAAREGWRDKRIVMIFQPHRYSRTRDLFDDFVQVLSQVDALIMLDVYAAGEAPIVGADSKSLCRSIRNLGKVDPILVSDTSQLGDVLDQIIQDGDLILAQGAGSVSKISRGLAESWKN

SEQ ID NO: 2399 - DNA, 921 bp, Haemophilus influenzae
atgaacttaaaacaagaaaaaatcgcggtgttattaggcggcacatctgctgaacgtgaagtttctttcaattcaggcaaagcggtattagaagcattattaaagcaaggttataatgcacatcctattgatcctaaagaatataatgttgcaaatcttaaaaaggatggctttaatcgagcatttaatattttgcacggtcgtggtggagaagatggcacaatgcaaggtttattagagcaaattggtttgccttatacggggtgtggcgtgatggcttctgcattaacgatggacaaaatgcgtacaaaaatgttgtggaaagcttttggtttacctgttgcagatatgaaagtggttacccgagaaactttttctgaattagatcctcaggctgttgtggcaaaattaggcttaccattaatggttaaaccctctttagaaggctctagcgttggcttaacgaaagtaaaagcggtagaagagttaaaaagtgcggtggaatatgcgcttaaatttgataataccattctaattgaagagtggttagctggcgatgaattaactgtgcctgtgcttgacaatcaagtattacccgcaattcgtattgttccagagggcgaattttatgattatgaagcgaagtatatttctgataatacgcaatatttctgcccagcaggtttaacgcctgaacgcgagcaagcgttatcaacattagtaaaacgtgcttatgatgcagtgggatgtcgtggttggagtcgtattgatgtaatgtgtgatgcaaaaggtaatttccgtttggttgaggttaatactaatcctggaatgacgagccatagtttattcccaaaatctgcagcgacggtaggtatttcttttgagcaactcgtcgtgaaaattttggagttgagcctgtaa

SEQ ID NO: 2400 - protein, 306 aa, Haemophilus influenzae
MNLKQEKIAVLLGGTSAEREVSFNSGKAVLEALLKQGYNAHPIDPKEYNVANLKKDGFNRAFNILHGRGGEDGTMQGLLEQIGLPYTGCGVMASALTMDKMRTKMLWKAFGLPVADMKVVTRETFSELDPQAVVAKLGLPLMVKPSLEGSSVGLTKVKAVEELKSAVEYALKFDNTILIEEWLAGDELTVPVLDNQVLPAIRIVPEGEFYDYEAKYISDNTQYFCPAGLTPEREQALSTLVKRAYDAVGCRGWSRIDVMCDAKGNFRLVEVNTNPGMTSHSLFPKSAATVGISFEQLVVKILELSL

SEQ ID NO: 2401 - DNA, 765 bp, Haemophilus influenzae
atgaacattctgaaaagaaaaacgccacagaatattcgttttggagaacaaaagcctaaatattattttcatattcggacttttgcggtattgcttggtgtcttttttttacttggtgtttattttaattggcaaagcattttagaaaaaatggatgataagccgattagcgcatttgcacttgttggacaaaatacctttactactgctgatgatattaaagaaagcctattaaaaatgggcgaattaaaaggattttgggggcaagatgtggcaccgattcaagagcaaattgaggctttaccttgggttaaaggtgcaatcgtaagaaaaatgtggccaaatcgtttaagtatttgggtatcagaatatcaacccgttgcgttttggaatcaaaatcaatttgttacccttgatggtatcgtttttcagcttccttctgtacgtttaactgcaaaaaatttgccctatttgggcgggcccgattatcagagtttgaaagtaattgagacgtggaaccaaatttatattaatttaaaatcaaataatataatggcaaagggaattaatattgatgatcgcggtgcgtggcaggtccagcttgataatgatattgtgctaaaattaggtcgtggcgattggaaatcaaaacttgagcgatttgtcacaatttatccgcaaattgatgtgccagaaaacaaaaagatagattatatagatttaagatatacggcaggtgcagctgtaggtatggttgatagataa

SEQ ID NO: 2402 - protein, 254 aa, Haemophilus influenzae
MNILKRKTPQNIRFGEQKPKYYFHIRTFAVLLGVFFLLGVYFNWQSILEKMDDKPISAFALVGQNTFTTADDIKESLLKMGELKGFWGQDVAPIQEQIEALPWVKGAIVRKMWPNRLSIWVSEYQPVAFWNQNQFVTLDGIVFQLPSVRLTAKNLPYLGGPDYQSLKVIETWNQIYINLKSNNIMAKGINIDDRGAWQVQLDNDIVLKLGRGDWKSKLERFVTIYPQIDVPENKKIDYIDLRYTAGAAVGMVDR

SEQ ID NO: 2403 - DNA, 1278 bp, Haemophilus influenzae
atggttaaaggtgtggaaacaaaaacaatagtaggtttagaggttggcacgtcaaaagtggtcgctgtagttggcgaagtatttcctgatggtgtagtgaatgtgcttggtgtaggcagttgtccttcaaaagggattgatcgtggcagcatcactgatcttgatgccgtggtgggttcgattcaacgtgctattgaagcggcagaatctatggctgattgtcagattatgagtgtgactttagccattactggagagcatattcaaagcctcaatgaaagtggttttgtgccgatagcagaaagtgaagtaacacaagaggaaatcgattccgcacttcatacagcaagctcaataaaattgccagaaggcttatctttattgcatgttattccacaagaatacgctgttgatcgtcagatgaacattaaaaatccattaggattacaaggcgtgcgtttaaaagcacaagtacatttgatcgcttgtcatcaagattggcaaaataacttaaaaaaagccattgaacgttgtggattgcaagtggataaagtggttttctctggttttgcagcaacacattctgtgctaactgaggatgaaaaagatctcggcgtgtgtttaattgattttggtgctggcacaatgaacgtgatggtttatacgaatggcgcattacgttttagcaaggtaattccttacgcaggaaatattgtgacaaatgatattgcgcatgcttgtacaatttcgcgagcagaagcagaacggatcaaagtgaactatgctagtgcattttacccagctcgtttgcacggagataaaaaaattgaagtggcaagtattggcggtcgtgcgcctcgttcattaacaaaaagtgatttatctttaattacatcagctcgttatacggagcttttaggcgtggtaaaagatgaattagataagttaaaagctgaattagaagcaaaacatattaaatttgaattaattgcaggcgtggtaataactggtggtggagcgcagattgaagatcttaaagaatgcgctttaaatgttttccattgtcaggtgcgtattgcgagtccattaaatattactggtttgactgattacgtgaatcgtccacaatattcaacggtggtgggactattgcaatataattacagtaatagtgatgatgatttaatttcaggaagtgatgattctgaaggaactttctttgaatctatttggcaaggagtaaaaaaaattgtcaataaagtacggtcagaattttga

SEQ ID NO: 2404 - protein, 425 aa, Haemophilus influenzae
MVKGVETKTIVGLEVGTSKVVAVVGEVFPDGVVNVLGVGSCPSKGIDRGSITDLDAVVGSIQRAIEAAESMADCQIMSVTLAITGEHIQSLNESGFVPIAESEVTQEEIDSALHTASSIKLPEGLSLLHVIPQEYAVDRQMNIKNPLGLQGVRLKAQVHLIACHQDWQNNLKKAIERCGLQVDKVVFSGFAATHSVLTEDEKDLGVCLIDFGAGTMNVMVYTNGALRFSKVIPYAGNIVTNDIAHACTISRAEAERIKVNYASAFYPARLHGDKKIEVASIGGRAPRSLTKSDLSLITSARYTELLGVVKDELDKLKAELEAKHIKFELIAGVVITGGGAQIEDLKECALNVFHCQVRIASPLNITGLTDYVNRPQYSTVVGLLQYNYSNSDDDLISGSDDSEGTFFESIWQGVKKIVNKVRSEF

SEQ ID NO: 2405 - DNA, 1269 bp, Haemophilus influenzae
atgctatacccagagtaccctgagtacgataattttaacgaatccggcgcactgatcaaagtcgtaggtgtaggcggtggcggtggcaatgccgtaaaccatatggtaatgaatatggtaaaacaagaaatgggcggaacctttgttggcgaaagttcattaacatcagaggaacacggtcgcatagtattttatgccgtcaatactgatgctcaagcattgcgtaaaagtcaagttcaacagaccgtacaaattggtggagaaacaaccaaaggtttaggtgctggggcaaatccgaatattggtcgtaaggcagctgaagatgatcaggatgaaatccgcaaaatgcttgaaggtgccgatatggtctttattgcagcaggtatgggcggcggcacaggtacgggtgcggcacctgttgttgctaaaattgctaaagaactgggtattttgactgttgctgtagtgactaaaccttttgcctttgaaggcaaaaaacgtatgcaatttgcagagcttggtattaaagatttatcccaatatgttgattcaatgattattattccgaatcaacaaatccaaaaagttctccctaaaaatgctaaattaattgatgcttttgctgctgcaaacgacgtattgcgtaattctgtaatgggaatttcagatatgattacctctcctggtttaattaacgtggacttcgctgatgtaagaacggtaatgtcagttcaagggcaagctatgattggttttggttcagctgtgggagaacccggtgcaggtagagcagaagaggcagctcgtcttgcagtacgcaatgatcttctagaaaaaatcgatctttctaacgctcaaggaattttagttaatattactgctggaatggatttagtttttgaagagtttaacattataggtgagacaataggtagttttgcttctgaagaagctacagttgttgttggtacgagtttagtgcctgagatgagcgatgaaattcgtgtaactattgtggcaactggtctcggtgaaattgcaggaaatgaaccaattcaggttgttcgtcaagggctttctacgcagaatattgaagaaggtgaaggacgtgtaaacattgttcctgaacttcatcgtcgtgaatctgttgaagtgtcaagaactgcatcagaagaatatcaacggccgttagataaaccgattacagatcgcttggaagcatttaagaaaaataatttctttaatcctgcacagcgtgaagaaaattaa

SEQ ID NO: 2406 - protein, 422 aa, Haemophilus influenzae
MLYPEYPEYDNFNESGALIKVVGVGGGGGNAVNHMVMNMVKQEMGGTFVGESSLTSEEHGRIVFYAVNTDAQALRKSQVQQTVQIGGETTKGLGAGANPNIGRKAAEDDQDEIRKMLEGADMVFIAAGMGGGTGTGAAPVVAKIAKELGILTVAVVTKPFAFEGKKRMQFAELGIKDLSQYVDSMIIIPNQQIQKVLPKNAKLIDAFAAANDVLRNSVMGISDMITSPGLINVDFADVRTVMSVQGQAMIGFGSAVGEPGAGRAEEAARLAVRNDLLEKIDLSNAQGILVNITAGMDLVFEEFNIIGETIGSFASEEATVVVGTSLVPEMSDEIRVTIVATGLGEIAGNEPIQVVRQGLSTQNIEEGEGRVNIVPELHRRESVEVSRTASEEYQRPLDKPITDRLEAFKKNNFFNPAQREEN

SEQ ID NO: 2407 - DNA, 918 bp, Haemophilus influenzae
atgattaaacaaagaacattaaaacaaagtattaaagttacaggcgttggcttgcatagcggtgaaaaagtgacattaaccttgcgcccagctatgccaaacactggtgttgtttattatcgtacagatttaaaccctacggtggcattccctgctgatcctaattcagtgcgtgatacaatgctttgtaccgcactaattaatgaacaaggtgtgcgtatttctaccgtcgagcatttaaatgcagctttggcagggcttggtattgataatattattattgaagttgatgctcctgaaattccaattatggatggtagtgctagtccgtttatctatttgttgttagatgcgggaattgaagaacaaaatgcagcgaaaaaatttattcgtattaaggaatatgttcgagttgaagatggtgataaatgggctgaatttaagccttacaatggtttccgtttagattttactattgattttgaccatcctgctattggcaaagatgtacgtaactatgaaatgaatttttctgcccaagcatttgttcatcaaattagccgagcaagaacttttggctttatgaaagatattgaatatcttcaatctcaaggtttagtattaggtggtagccttgataatgcgattgttcttgatgattatagaattttaaatgaagatggtttacgttttaaagatgaacttgttcgtcataaaatgttagacgcaattggtgatctttatatggctggttataacattatcggtgattttaaagcctataaatcaggtcacggtttaaataacaagttacttcgtgctgttttagcaaatcaagaagcgtgggaatttgtaacctttgaagataaagcgcaagtgccacaagggtatgtagctccagtgcaagtgcttatttaa

SEQ ID NO: 2408 - protein, 305 aa, Haemophilus influenzae
MIKQRTLKQSIKVTGVGLHSGEKVTLTLRPAMPNTGVVYYRTDLNPTVAFPADPNSVRDTMLCTALINEQGVRISTVEHLNAALAGLGIDNIIIEVDAPEIPIMDGSASPFIYLLLDAGIEEQNAAKKFIRIKEYVRVEDGDKWAEFKPYNGFRLDFTIDFDHPAIGKDVRNYEMNFSAQAFVHQISRARTFGFMKDIEYLQSQGLVLGGSLDNAIVLDDYRILNEDGLRFKDELVRHKMLDAIGDLYMAGYNIIGDFKAYKSGHGLNNKLLRAVLANQEAWEFVTFEDKAQVPQGYVAPVQVLI

SEQ ID NO: 2409 - DNA, 1158 bp, Haemophilus influenzae
atggcattagaattatctgacattcgccaacaaattacgcaaatagatcgtagtttattaaaattactttctgagcgtcatcgtttagctttcgatgtagtgagaagtaaagagatctcgcaaaaatctttacgtgatgtagagcgagaacagcaacttttacaagaactagtgcaatttgcagaaaatgaaaattatcagcttgaagcacaatatatcacttcaattttccaaaaaatcattgaagactcggtattgacccagcaagtctatttgcaaaataaacttaatgaacaacgtaatcaaaatttacatattgcttttttaggtaagagagggtcttattcaaatttagctgcacgtaattatgctgctcgttatcaaaaacaatttgtagaactaggatgtcagtcttttgagcaagtatttgaaaaagttcagactggagaagctgactttggcgtattgcctttagaaaatacaacatcgggtgcaattaatgaagtttatgatttacttcagcatactgatttatcattagtgggagagttggcatatccaatcaaacattgcgtacttgtcaatgataagacagatttgagtcaaattgatacgttgtatagtcatcctcaagtgattcaacaatgtagtcaatttattcatagtcttgatcgtgtgcatattgaatattgcgaaagcagttcacacgcaatgcaattagtcgcaagtttgaataaacctaatattgcagcattgggtaatgaagatggtggaaaattgtatggacttagtgtattaaaaactaatattgctaatcaagagaacaatattacacgttttattgtggtggctaaagatcctcgcgaagtttcatcacagattcccacaaagaccttattattaatgacaacttcacagcaagctggcgcgttagtggatgctttattcgtgtttaaaaagcatcaaataaatatgacaaaactggaatctcgaccgatttatggtaagccttgggaagaaatgttttatctagaaattgaagcaaatattcatcatccagatacaaaacaggctttggaagaattaaaaggttatagcaattacttaaagattttaggttgttatcctagtgagattgtaaagcctgtgagtgtataa

SEQ ID NO: 2410 - protein, 385 aa, Haemophilus influenzae
MALELSDIRQQITQIDRSLLKLLSERHRLAFDVVRSKEISQKSLRDVEREQQLLQELVQFAENENYQLEAQYITSIFQKIIEDSVLTQQVYLQNKLNEQRNQNLHIAFLGKRGSYSNLAARNYAARYQKQFVELGCQSFEQVFEKVQTGEADFGVLPLENTTSGAINEVYDLLQHTDLSLVGELAYPIKHCVLVNDKTDLSQIDTLYSHPQVIQQCSQFIHSLDRVHIEYCESSSHAMQLVASLNKPNIAALGNEDGGKLYGLSVLKTNIANQENNITRFIVVAKDPREVSSQIPTKTLLLMTTSQQAGALVDALFVFKKHQINMTKLESRPIYGKPWEEMFYLEIEANIHHPDTKQALEELKGYSNYLKILGCYPSEIVKPVSV

SEQ ID NO: 2411 - DNA, 858 bp, Haemophilus influenzae
atggaaattatcattattagtgggcgttctggtgcaggaaaatctgtagccttacgagcattagaagatacaggatattactgtgttgataatattcctttagatttgcttcctcaattgactgatattctgtctcaatctcaatcttcggtcgccattagtctcgatattcgtaatattccaaactccgctaattctcttgagcaaaccctttcaacgttacaaaatcatcatcaaattaaaatcattttcttagaggctgatcatgctaccctgattcgccgatatagtgattcacgccgtttgcacccgctttcattaaaagatctatctcttgaagctgcaatagatgaagaatatcgctatcttgagccattgattcaacacgcaaatcttattcttgataccacccatctttctacgcatattcttgcagaacgattacgcgaatttttacgcgataatagtgaaaaagaattaaaaattattgttgaatcttttggttttaaatatgggattcctttagatgcggattatgttttcgatgtccgctttttgcctaacccccattgggatccaacattacgcccaatgactggattagaagcccctgtcgcagaatttctaaatagtcatacagaagtcaatgaatttatttatctcactcgtcattacattgatacttggttgccgatgttagaaaaaaataaccgtagctatttgacgattgccattggatgtactgggggaaaacaccgctccgtttatatagcacagcagttaggcgaatattttcaagccaaaggaaaaacggtacaaattcaacataaatccttagaacggaacaaaaaaatataa

SEQ ID NO: 2412 - protein, 285 aa, Haemophilus influenzae
MEIIIISGRSGAGKSVALRALEDTGYYCVDNIPLDLLPQLTDILSQSQSSVAISLDIRNIPNSANSLEQTLSTLQNHHQIKIIFLEADHATLIRRYSDSRRLHPLSLKDLSLEAAIDEEYRYLEPLIQHANLILDTTHLSTHILAERLREFLRDNSEKELKIIVESFGFKYGIPLDADYVFDVRFLPNPHWDPTLRPMTGLEAPVAEFLNSHTEVNEFIYLTRHYIDTWLPMLEKNNRSYLTIAIGCTGGKHRSVYIAQQLGEYFQAKGKTVQIQHKSLERNKKI

SEQ ID NO: 2413 - DNA, 495 bp, Haemophilus influenzae
atgaaaataactgaattattaagccctgagaatattcgtcagggcgttagtttttctagcaaaaaacgattatttgaatctatttcacattttgtggtagaacaagttcttgcagaacaaggcgaacaagcctgttttgaatgtctttttgaacgtgaaaaactggggaattctggtttaggaaatgggattgcaatgccaaaagcaaaaatccccgtaacagtatcagataaagcaatcgcagtgtttatgcaactcgataatccgattgattacgatgctgttgatagtaaaccagtggacttaatctttgccttactgattccagaaaatcaatgtgaaagctacattccagttttagcatcattaatagaaaaactgactgataaaaatgtgttgaaacaattacgatcagccaaaagtgcggatgaaatttggcaagtttttgaaattaccgatcaatcagaaacgacacttgaagaagtgaaagaataa

SEQ ID NO: 2414 - protein, 164 aa, Haemophilus influenzae
MKITELLSPENIRQGVSFSSKKRLFESISHFVVEQVLAEQGEQACFECLFEREKLGNSGLGNGIAMPKAKIPVTVSDKAIAVFMQLDNPIDYDAVDSKPVDLIFALLIPENQCESYIPVLASLIEKLTDKNVLKQLRSAKSADEIWQVFEITDQSETTLEEVKE

SEQ ID NO: 2415 - DNA, 726 bp, Haemophilus influenzae
atgtcaattttgactgcagagaatttagctaaaagctacaaaagtcgtaaagttgtttcggatgtcagtttaaccgtaaattctaatgaaattgtcggtttgctcgggccaaacggtgcaggtaaaacaaccacgttctatatggtcgttgggcttgttcgccaagatcaaggcaaaattgttattgatggcgaagacattagtttgctcccaatgcataaccgtgcgcaacgtggcattggttatttaccgcaagaagcctcgatttttcgccgtttgactgtgtatgaaaatttgatggcggtattggaaatccgtaaagatttaacgccacaacaacgtcgtgaaaaagcagatgaattaattgaagaatttaacattgctcatattcgagataatttaggacaagccttatcaggcggcgaacgtcgccgtgtagaaatcgcacgtgccttagcggcaaatccaaaatttattctattagacgagccttttgctggtgtagatcctatttctgtaagcgatattaaaaaaattatcaccgacttacgtaaccgaggattaggtgtattaattactgaccataatgtccgtgaaacccttgatgtttgcgaacgcgcttatattgttggcgcaggtaaaattatcgcaacaggtacaccggaacaagtgatgaacgatgaacaggttaaacgcgtttatcttggcgaacaattcaaattataa

SEQ ID NO: 2416 - protein, 241 aa, Haemophilus influenzae
MSILTAENLAKSYKSRKVVSDVSLTVNSNEIVGLLGPNGAGKTTTFYMVVGLVRQDQGKIVIDGEDISLLPMHNRAQRGIGYLPQEASIFRRLTVYENLMAVLEIRKDLTPQQRREKADELIEEFNIAHIRDNLGQALSGGERRRVEIARALAANPKFILLDEPFAGVDPISVSDIKKIITDLRNRGLGVLITDHNVRETLDVCERAYIVGAGKIIATGTPEQVMNDEQVKRVYLGEQFKL

SEQ ID NO: 2417 - DNA, 519 bp, Haemophilus influenzae
atgaagttagtaagcaataaaattctttttcttgcaacgatggtattagcatcaagttcagcttttgcattgaaagatgacgttaatcagccgataaatatcgtttcggataatcaatccttagatatggaaaaaagtgtagtgacattcacagataatgtagtaattacacagggatctatcatcattaaagcaaataaagttgttatcactcgtcccgctgaaaaatcagggaaaaaagaaactgtagaagcattcggtacgccagtcacattccatcaacagttagataatggcactccagtagatggaaaagcaaataaagttcattatgatcttggcaacgaatttttaacattaactaacaatgccgaattaaagcagcttgatagtaaaattaatggcagtgttattacctatgatgtgaagaaacaacaacttaaagctaatggtaatggaaaatcacgggtaacaacagttcttattccatctcaattacaacaagctaaagggaagtaa

SEQ ID NO: 2418 - protein, 172 aa, Haemophilus influenzae
MKLVSNKILFLATMVLASSSAFALKDDVNQPINIVSDNQSLDMEKSVVTFTDNVVITQGSIIIKANKVVITRPAEKSGKKETVEAFGTPVTFHQQLDNGTPVDGKANKVHYDLGNEFLTLTNNAELKQLDSKINGSVITYDVKKQQLKANGNGKSRVTTVLIPSQLQQAKGK

SEQ ID NO: 2419 - DNA, 585 bp, Haemophilus influenzae
ttgggcgttatcgcactttgtgctttggcgtggttttattccttaaatcaggaaaccgcagatttatctgaacttgtgaaaaaaccagatagtcctgattatgtgggttataaaatggaaacaacggttttttcccctgagggtaaaaaacaatatttggctttatccgataaaattgagcattatacagtcaatgaacaaaccctttttaccgcgcctttagtttatttatatcccacaacatcaaatgaaaaggaacaaaatcccaatcaaaatgtagatttttttagcacacaaaactggaaattaagtgcaaatcaagcaagattgacaaaagatcaaatattgtatttagagggtaatgtcgtcgtgcaaagtttaacatcagattctcgtttgcaacgcattgaaacagaatcagcggtcgtcaatttaaaaacacaggatatgacttccgaaacacaggttaaaattaagggtaaaaattttagttctacaggattaaaattagtcggaaatttacgccaacaagtggcgacattaaaggaacaggtaaaaacatattatgaagttagtaagcaataa

SEQ ID NO: 2420 - protein, 194 aa, Haemophilus influenzae
MGVIALCALAWFYSLNQETADLSELVKKPDSPDYVGYKMETTVFSPEGKKQYLALSDKIEHYTVNEQTLFTAPLVYLYPTTSNEKEQNPNQNVDFFSTQNWKLSANQARLTKDQILYLEGNVVVQSLTSDSRLQRIETESAVVNLKTQDMTSETQVKIKGKNFSSTGLKLVGNLRQQVATLKEQVKTYYEVSKQ

SEQ ID NO: 2421 - DNA, 537 bp, Haemophilus influenzae
atggcaaaacgtaagaaaaaagaagttttcgattgggaagatgaagatcaagaagaaattatttgggtgagtaaaagcgaaatcaaacgcgatgcggaagatttaaaacaacttggcgaaaaaattgtcaatctcacgaaaaacaatctggcaaaaattccacttaatgaatccttacttgatgccattgaacttgcacagcgtttacaaaaagaagctcgccgccgtcaattacaatatatcggtaaattattgcgtggaattgatgttgaacctattcgtgaagccttagataaaattgaaaataagcataatcaacaacaagctatgttgcacaaaatcgaaaaagtgtgcgatgaattggtggaaaaaggtgatgtggctttaactgatttactaaatgattatcctgatggcgatcgtcagcaactacgcaatctgattcgttctgcacaaaaagaactggaacaaaataaaccatcaaaagcctatcgagaaatttatcaaatgctcaaggtattaatgttggaagattaa

SEQ ID NO: 2422 - protein, 178 aa, Haemophilus influenzae
MAKRKKKEVFDWEDEDQEEIIWVSKSEIKRDAEDLKQLGEKIVNLTKNNLAKIPLNESLLDAIELAQRLQKEARRRQLQYIGKLLRGIDVEPIREALDKIENKHNQQQAMLHKIEKVCDELVEKGDVALTDLLNDYPDGDRQQLRNLIRSAQKELEQNKPSKAYREIYQMLKVLMLED

SEQ ID NO: 2423 - DNA, 1356 bp, Haemophilus influenzae
atgaaaacagccgaaaattcaaccgcacttttaaaagcacaagaacaagaattacgtcaagccgtcagttttgcagtggcgttagcaacgaaagctggcgcaagtgcagaagttgcggtcacaaaagtgagcggtttatccgtatctgctcgtttgcaagaagttgaaaacgtagaatttactaatgatggcgcattggggatttctgtttatatggggcaacaaaaaggcaatgcctcgacttccgatttaagcgaaagcgcaattaaaaatgcagtggaagccgcacttgctattgcaaaatacacttcacccgatgattgcacaggccttgcggataaggatttaatggcttttaatgcgcctgatttagaactttatcatgctgctgatgtggatgtcgataaagcaacagaacttgcacttcaggctgaaaaggcggctttagaggcggatgaacgcattataaatagtaatggtgcaagttttaattcccatacaggcgtgaaagtttatggaaatagccatggcatgttgcaaagttatttatcaagccgttattccttatcttgttcggttattggtggcgtagaagatgccttagaaaatgattacgaatacacaatttctcgtgagtttgacaaactccaatcgccaatttgggttggcaaaaattgtgcaaagaaagtcgtttctcgtttaaatcctcaaaaattgagtacacgagaagtgccagttattttcttaaatgatgttgcaactggtcttatttctcactttaccgctgcaataagtggtggcagtttatatagaaaatcaagtttcttgctcgattatttaggtaaacaggtcttaccagattggttcaatatcagtgagagaccacatttattacgccgtttagcttccacgccttttgatagtgaaggtgtccgtacgcaagatcgtgaaattgtcgaaaacggcatattacaaacttatttagtgacaagttacagcggtaaaaaacttggtatgccaagtacagggcacgctggaggcattcacaactggcttgttaagccaaatttaacgggaggattgaccgcacttttacgtcaaatgggaacaggcttactcgtaacagatgttatggggcaaggggtcaatatcgttactggcgattattcccgtggcgcatcaggtttttgggtggaaaatggagaaattcaatatccagtcgccgaaattaccattgcgggacaattgcaagatatgttgaagaatatgcttgctgtagcggatgatatagagcatcgttctaatattcaaacgggttctattttgttagataaaatgaaaatttcaggaaattaa

SEQ ID NO: 2424 - protein, 451 aa, Haemophilus influenzae
MKTAENSTALLKAQEQELRQAVSFAVALATKAGASAEVAVTKVSGLSVSARLQEVENVEFTNDGALGISVYMGQQKGNASTSDLSESAIKNAVEAALAIAKYTSPDDCTGLADKDLMAFNAPDLELYHAADVDVDKATELALQAEKAALEADERIINSNGASFNSHTGVKVYGNSHGMLQSYLSSRYSLSCSVIGGVEDALENDYEYTISREFDKLQSPIWVGKNCAKKVVSRLNPQKLSTREVPVIFLNDVATGLISHFTAAISGGSLYRKSSFLLDYLGKQVLPDWFNISERPHLLRRLASTPFDSEGVRTQDREIVENGILQTYLVTSYSGKKLGMPSTGHAGGIHNWLVKPNLTGGLTALLRQMGTGLLVTDVMGQGVNIVTGDYSRGASGFWVENGEIQYPVAEITIAGQLQDMLKNMLAVADDIEHRSNIQTGSILLDKMKISGN

SEQ ID NO: 2425 - DNA, 540 bp, Haemophilus influenzae
atgaaaaaacaccacgtagatgttttaatctcagagaataatgttcatgcgcgtattgctgaattaggtgctcaaattacaaaattttatcaagaaaaacagatcgataaccttgttgtcgtagggcttttacgtggttcctttatgtttatggcggatattgttcgtcagataaatttacctgtggaaattgaatttatgactacttcaagttatggcactggtatgaccacgaatcacgacgttcgtattaccaaagatttggacggcgatataaaaggtaaacacgttttaattgtggaagatattattgatacgggctataccttggaaaaagtgcgtgatattttgaatttgcgtgagcctgcgagccttacaatttgtacgttacttgataaaccttctcgccgcgaagtggaagtgcctgttgaatgggttggttttgaaattcctgatgaatttgttgtggggtatggtatcgattacgcacaacgccatcgtaatttaggttatatcggtaaagttgttttagaagaataa

SEQ ID NO: 2426 - protein, 179 aa, Haemophilus influenzae
MKKHHVDVLISENNVHARIAELGAQITKFYQEKQIDNLVVVGLLRGSFMFMADIVRQINLPVEIEFMTTSSYGTGMTTNHDVRITKDLDGDIKGKHVLIVEDIIDTGYTLEKVRDILNLREPASLTICTLLDKPSRREVEVPVEWVGFEIPDEFVVGYGIDYAQRHRNLGYIGKVVLEE

SEQ ID NO: 2427 - DNA, 210 bp, Haemophilus influenzae
ttgattttattgaaaagtgcggttgaaattttaaatgaatttttagccgcacttttttatattatttcattgctattttctcgatcacttgctaaatctttttacagcaaatacagccgttatattgataatcttgctggggcaattttcttatttttcggcggctatttagtttattcaggcgtgctagccactgcagccgcattttaa

SEQ ID NO: 2428 - protein, 69 aa, Haemophilus influenzae
MILLKSAVEILNEFLAALFYIISLLFSRSLAKSFYSKYSRYIDNLAGAIFLFFGGYLVYSGVLATAAAF

SEQ ID NO: 2429 - DNA, 1323 bp, Haemophilus influenzae
atgttattagtcaatttggcgatatttattgcttttttattgctgttagcacagctatatcgcaaaaccgaaaaattagggcaaacggtatttatcggtttattgctcggtttgctttttggtgcggtattgcaatccgcttttgaaaaacctttgttagacaaaactttagattggatcaacgtggtcagtaacggttatgttcgtttattgcagatgatcgtgatgccgttggtgttcgtgtcgattttatctgctatcgctcgtatcaatcaaaccagatcattgggcaaagtcagcgttggcgtgttatccaccttgctgattaccaccgccatttccgctgcaattgggattgcgatggtgcatttatttgatgtgtcggcggcaggattaatcgtgggcgatcgtgaattagcggctcaaggcaaagtgttagataaagcagggcaagtgtccaatttaactgtgcctgcgatgttggtgtcctttattccgaaaaatccttttgctgatctcacgggtgccaacccaacgtccattattagtgtcgtaattttctcagcattacttggcgtagcggctttgagtttaggcaaagaagatcaagcacttggcgaacgaattgcacaaggtgtagaaactttaaacaaattagtgatgcgtttggtgcgttttgtgattcacttaaccccttacggcgtgtttgcgttgatgattaaaatggctgccacctcaaaatgggcggatattgtcaatttgggcaattttattgtggcttcttacgctgctattgccttaatgtttgtggttcacggcattttattgttcttcgtcaaagtcaatcctgtggattactacaaaaaagtgttgccaaccttaagttttgcgtttacatctcgctcaagtgcggcgacaattccgttaaatattgaaacgcaaaccgcaaaattaggtaacagcaatgtcatcgccaactttgctgccacattcggtgccactatcggacaaaacggctgtggcggcatttatccagcgatgcttgctgtaatggtcgccccaatggtcggcattgacccttttagcttcagctacattctaaccttaattttcgtggtcgccatttcttcattcggcatcgcaggcgtaggtggcggagccacattcgccgctatcgtcgtgctatctacgttaggtttaccactggaattaatcggtttactcatttccatcgaaccgctcatcgatatgggacgtaccgcacttaacgtaaacggtgccatggtggcaggcacgattacggatcgcttgctaaataagtaa

SEQ ID NO: 2430 - protein, 440 aa, Haemophilus influenzae
MLLVNLAIFIAFLLLLAQLYRKTEKLGQTVFIGLLLGLLFGAVLQSAFEKPLLDKTLDWINVVSNGYVRLLQMIVMPLVFVSILSAIARINQTRSLGKVSVGVLSTLLITTAISAAIGIAMVHLFDVSAAGLIVGDRELAAQGKVLDKAGQVSNLTVPAMLVSFIPKNPFADLTGANPTSIISVVIFSALLGVAALSLGKEDQALGERIAQGVETLNKLVMRLVRFVIHLTPYGVFALMIKMAATSKWADIVNLGNFIVASYAAIALMFVVHGILLFFVKVNPVDYYKKVLPTLSFAFTSRSSAATIPLNIETQTAKLGNSNVIANFAATFGATIGQNGCGGIYPAMLAVMVAPMVGIDPFSFSYILTLIFVVAISSFGIAGVGGGATFAAIVVLSTLGLPLELIGLLISIEPLIDMGRTALNVNGAMVAGTITDRLLNK

SEQ ID NO: 2431 - DNA, 468 bp, Haemophilus influenzae
atgaactacctccaatactacccgaccgatgtgattaatggcgaaggaacaagatgcacacttttcgtcagtggctgcacgcatgcttgcaaaggttgctacaaccaaaaaagttggtcattttcagcgggtgtgttatttgatgaagcaatggaacaacaaatcatcaatgatttaaaagacacacgcattaaacgccaaggtctgacgctttcaggtggcgatccacttcatccgcgcaacgtagaaacattactgccctttgtgcaacgcgtaaaacgagaatgtcccgataaagacatctgggtttggacgggttataagctagatgaattagacgaacaacaacgtgctatgttgccttatattgatgtgttaattgatgggaagtttattcaagaacaggctgacccaagtttagtttggcgaggttccgcaaatcaaattattcatcgatttaagttataa

SEQ ID NO: 2432 - protein, 155 aa, Haemophilus influenzae
MNYLQYYPTDVINGEGTRCTLFVSGCTHACKGCYNQKSWSFSAGVLFDEAMEQQIINDLKDTRIKRQGLTLSGGDPLHPRNVETLLPFVQRVKRECPDKDIWVWTGYKLDELDEQQRAMLPYIDVLIDGKFIQEQADPSLVWRGSANQIIHRFKL

SEQ ID NO: 2433 - DNA, 1731 bp, Haemophilus influenzae
atgcgcacattacttccgtttatacgtttatttaaattcgccaaatttccgcttattttaggcttggtgctaatgattctaggtttgggctctagtatgggcttgcttaccgtttcaggctggtttttagccgctacagccattgcaggactaggcacgctatttaactttttctacccttcagccagtgtgcgaggtttagctatcggacgaaccgtcatgcgctattttgaaaaaatagtgacgcatgatgcaacattccgcattttgtcgaaattacgcgtacaagtatttgaaaaaatcattcctttaagcccagcggtattaaatcgttatcgcaacagcgatttattaaatcgtttagtttccgatgtggatacccttgatagcctctatttacgtttacttgcgccatttttcactgctgtatttgtaatcattgccataacgattggacttagctttatcaatattccactcgcacttggtttaggcttatttttgttaattttattaataattatccctactgttttctatcgactaggacagcaatttggcgaacgcttaatccaagcacgtgcgacctatcgaacccagtttttagaatttatccaagcacaagccgagcttttattatttaatgcggaagatagattaaaagaaaaaatgtcagtcacagaaaaaacatggcaggaagatcaagccaaagaagcaaaattaagcggattttctaccgcacttgttctctttcttaatggtttgttgatttctggaatgctatggtttgcaagtaacgccaattttggcacagatgaataccgcacggcttatattgcacttttcacttttgctgcacttgcagcctttgagatcatcatgccactgggtgcagcatttttacatataggtcaagttattgcggcagcagaacgtgtgaccgaaatcattgagcaaaaaccgcttgttgagtttaatggtaacgaggaatttgaaacaaaagtgcggttaatttctgcgaagaatttaaatttttcctatcccgaacaagaaacactcgtattaaaaaatcttacattagatttagaacagggcaaaaaaattgctattttaggcaaaactggaagtggaaaatcttcacttcttcaacttttagtacgcaattatgatgcgaatcaaggtgagcttttattggcagaaaaacccatttccgcctattcagaagaaacattacgccgccaaatttgttttttaactcaacgtgttcacgtattcagcgatacacttcgtcaaaatttacaatttgcaagtgcggataaaatttctgatgaaaaaatgattgaagtactacatcaagttggcttaagcaaattacttgagcaagaaggaaaaggtttaaatctttggcttggggatggcggtcgtccactttctggtggggaacaacgccgtttaggtttagcgcgtattttactcaataatgcaccaattttattgttagatgaaccagcagaaggcttagatcgcgaaactgaacgtcaaattttacgtttaattctgcaacatgccgacaataaaaccctaattatagtcactcaccgtctcagttcaattgaacaattcgataaaatttgtgtaattgataacggaagattaatcgaagaaggcgattacaatagtttaatcaccaaagaaaatggtttctttaaaagattgattgagcgagtatga

SEQ ID NO: 2434 - protein, 576 aa, Haemophilus influenzae
MRTLLPFIRLFKFAKFPLILGLVLMILGLGSSMGLLTVSGWFLAATAIAGLGTLFNFFYPSASVRGLAIGRTVMRYFEKIVTHDATFRILSKLRVQVFEKIIPLSPAVLNRYRNSDLLNRLVSDVDTLDSLYLRLLAPFFTAVFVIIAITIGLSFINIPLALGLGLFLLILLIIIPTVFYRLGQQFGERLIQARATYRTQFLEFIQAQAELLLFNAEDRLKEKMSVTEKTWQEDQAKEAKLSGFSTALVLFLNGLLISGMLWFASNANFGTDEYRTAYIALFTFAALAAFEIIMPLGAAFLHIGQVIAAAERVTEIIEQKPLVEFNGNEEFETKVRLISAKNLNFSYPEQETLVLKNLTLDLEQGKKIAILGKTGSGKSSLLQLLVRNYDANQGELLLAEKPISAYSEETLRRQICFLTQRVHVFSDTLRQNLQFASADKISDEKMIEVLHQVGLSKLLEQEGKGLNLWLGDGGRPLSGGEQRRLGLARILLNNAPILLLDEPAEGLDRETERQILRLILQHADNKTLIIVTHRLSSIEQFDKICVIDNGRLIEEGDYNSLITKENGFFKRLIERV

SEQ ID NO: 2435 - DNA, 1884 bp, Haemophilus influenzae
ttgtatggcagccttggatgcagaacgctatttagatgctcaagaagcataaatcttctaaccaattcccctcttttaactcttttaaagaggggaactttttctataatcacgaccaaaacaatgaataaacttcgccaaaaatatttacaaaaatggcttcgcgcacaacaagaacctatcaaaaaattaatgcgtgcaaacattgtcttagctacgctttcttcattcattttagtcgcacaaacttattttcttgcgacgttgctcgataaactgattatacaaaatatgcctcgtgatgaacttattccttattttctcgggctaattatcggcttcgggatgcgtgctattattttatgggcacgcgaaaaaataggtttccaaagcggacaattattacgcaaccatattcgtcaaaaaattctggataaaatccatcttgtcggccctgcgacaatcaatcaaaaaccagctggaagttgggcaagcattatgttggaacaagttgaaaacttacataatttctatgcccgttttctgcctcaacaaagtctttcagccattgttccagtggttattttcattgctgtatttccgttgaactgggctgcaggcttaatcttaatgattaccgcaccgcttgttcctctgtttatgatcattgtcggtattgctgcggctgacaacagccaaaaaaatatggataccctttctcgcctcagtgcccaatttttagatcgcttacgcggtttggaaaccttgcgtctttttaaccgcacttctgaacaaactgagcatattgaaaatgccactgaagatttccgtgaaaccacaatggatgtgctaaaactcgcttttctctcttctgcagtattggaattttttacctctatttccattgcactgatggcggtctattttggttttagctacttaggtcaaattgaatttggtacctataatgcaccgcttacacttttcacaggtttcttttgtttaattcttgcacctgaattttatcaacccttacgcgatctaggcacttattaccacgaccgtgcagcaggtattggtgcagcggatgccattgttgattttttagaatccgattatttaactgtacatcaaaatgaaaaaacaatttctttagaaagtgcggttgaaatttctgccgaaaatttagtggtgctttcgacacagggttcagcattaaccaagccgttaaacttccaaattccagcaaatcacaatgttgcacttgtagggcaaagtggtgcagggaaaacctcattaatgaatgtaattttgggctttttaccttatgaaggttctctcaaaattaatgggcaagaacttcgcgaaagtaatctagctgactggcgcaaacatattgcgtgggtaggacaaaatccattgttattacaaggcacaattaaagaaaacttactacttggcgatgttcaagccaacgatgaagaaattaatcaagcattaatgcgttctcaagcgaaagaatttaccgataaacttggacttcatcacgaaataaaagatggtggattaggcatttctgtgggacaagcgcaacgccttgccattgctcgggcattgttacgcaaaggcgatttacttctgctcgatgagccaaccgcaagcctagatgcgcaatcagaaaatcttgttttacaagcattgaatgaagcaagtcagcatcaaactacgctgatgattacccaccgaattgaagatttgaaacaatgtgatcaaatttttgtgatgcaacgaggagaaatagtacagcaaggtaaatttaccgaattacaacatgaaggtttctttgctgaactactcactcaacgacaacaggatatccaataa

SEQ ID NO: 2436 - protein, 627 aa, Haemophilus influenzae
MYGSLGCRTLFRCSRSINLLTNSPLLTLLKRGTFSIITTKTMNKLRQKYLQKWLRAQQEPIKKLMRANIVLATLSSFILVAQTYFLATLLDKLIIQNMPRDELIPYFLGLIIGFGMRAIILWAREKIGFQSGQLLRNHIRQKILDKIHLVGPATINQKPAGSWASIMLEQVENLHNFYARFLPQQSLSAIVPVVIFIAVFPLNWAAGLILMITAPLVPLFMIIVGIAAADNSQKNMDTLSRLSAQFLDRLRGLETLRLFNRTSEQTEHIENATEDFRETTMDVLKLAFLSSAVLEFFTSISIALMAVYFGFSYLGQIEFGTYNAPLTLFTGFFCLILAPEFYQPLRDLGTYYHDRAAGIGAADAIVDFLESDYLTVHQNEKTISLESAVEISAENLVVLSTQGSALTKPLNFQIPANHNVALVGQSGAGKTSLMNVILGFLPYEGSLKINGQELRESNLADWRKHIAWVGQNPLLLQGTIKENLLLGDVQANDEEINQALMRSQAKEFTDKLGLHHEIKDGGLGISVGQAQRLAIARALLRKGDLLLLDEPTASLDAQSENLVLQALNEASQHQTTLMITHRIEDLKQCDQIFVMQRGEIVQQGKFTELQHEGFFAELLTQRQQDIQ

SEQ ID NO: 2437 - DNA, 957 bp, Haemophilus influenzae
atgtcagatatcaaacacgcaaaacttttaattttaggctcaggtcctgctggttatacagcagccatttatgcggcacgtgcaaacttaaaaccagtattggtgactggtttgcaacaaggtgggcagctgaccactacagatgaaatcgaaaactggccgggtgattttaagatgactactggttcaggtttaatgcaacgtatgttgcaacatgcagaaaaatttgaaacagaaatcgtcttcgatcatatcaatcgcgtagatttatcttctcgcccattcaaactttttggcgatgtacaaaatttcacttgtgatgcgttaattatcgcaacgggtgcctctgcacgctatattggcttaccttcagaagaaaactacaaaggtcgtggggtttctgcttgtgcaacctgtgatggtttcttttatcgtaataagcctgttggtgtcattggtggtggaaatacagcagtggaagaagcactttacttagccaatattgcaagtacagtgcatttaatccaccgtcgcgatagcttccgtgcggaaaaaatacttatcgaccgtttatacaaaaaagtagaagaagggaaaatcgttcttcatactgaccgcactttagatgaagtattgggcgataatatgggcgtaactggattacgtttagccaacacaaaaactggggagaaagaagaactcaaattagatggcttattcgtggcgattggtcattcgccaaatacggaaattttccaagggcaactagaattgaataatggctatatcgttgtaaaatctggtcttgaaggaaatgcaacagccacttctgtggaaggcgtgttcgcagcaggcgatgtcatggatcacaattatcgccaagccatcacctccgcaggaactggttgtatggcagccttggatgcagaacgctatttagatgctcaagaagcataa

SEQ ID NO: 2438 - protein, 318 aa, Haemophilus influenzae
MSDIKHAKLLILGSGPAGYTAAIYAARANLKPVLVTGLQQGGQLTTTDEIENWPGDFKMTTGSGLMQRMLQHAEKFETEIVFDHINRVDLSSRPFKLFGDVQNFTCDALIIATGASARYIGLPSEENYKGRGVSACATCDGFFYRNKPVGVIGGGNTAVEEALYLANIASTVHLIHRRDSFRAEKILIDRLYKKVEEGKIVLHTDRTLDEVLGDNMGVTGLRLANTKTGEKEELKLDGLFVAIGHSPNTEIFQGQLELNNGYIVVKSGLEGNATATSVEGVFAAGDVMDHNYRQAITSAGTGCMAALDAERYLDAQEA

SEQ ID NO: 2439 - DNA, 858 bp, Haemophilus influenzae
atggctgattttccttttatcgttgagatcaacgaacaaaatcttactgaaatactgcaacaatccttagaaaaaccacttgtcatcaatttttacgtgccaacacataaagaatcggcggattttttggtgctacttgagcaagttgcagaacaatatcaaggacaatttattcttggaaaagtagattgtgaaaaagagcaaatgattgccgcacaattccgcatccaagcattgccaaccacctatttgtttaaagaagcacaggcattagatgcatttccaggcatgcttgataaagcgtcattaatccaacgattaagcattattttacctaaagaggaagatttaaaattccaacaagcattagatttcttgcaagtagaaaattacgaagctgcattgccattgttgaaagacgcatgggaactttccgataagaaaaacagtgatgttgccctgctctatgcggaaacctatattgcaatgaagaaaacggagccagcacaagaaattttaaatcaaattccattgcaagatcgtgatagccgttggcacggattacaagcacaaattgagctacaaattcaagcagccgatacacctgaaatccaacaattacaggctgattatgctaaaaacccaacagctgaaattgcaataaaacttgctgtacaacttcatcaagctggacgaaatgaagaagcattaacactacttttcggcattttaaaaacagatttaagcgcgcagaatggcgaagttaaacaacaatttttatctattttaagcgcaatgggcaatgctgatccgctgacaaataaatttcgtcgattgctttattcgctgctttattaa

SEQ ID NO: 2440 - protein, 285 aa, Haemophilus influenzae
MADFPFIVEINEQNLTEILQQSLEKPLVINFYVPTHKESADFLVLLEQVAEQYQGQFILGKVDCEKEQMIAAQFRIQALPTTYLFKEAQALDAFPGMLDKASLIQRLSIILPKEEDLKFQQALDFLQVENYEAALPLLKDAWELSDKKNSDVALLYAETYIAMKKTEPAQEILNQIPLQDRDSRWHGLQAQIELQIQAADTPEIQQLQADYAKNPTAEIAIKLAVQLHQAGRNEEALTLLFGILKTDLSAQNGEVKQQFLSILSAMGNADPLTNKFRRLLYSLLY

SEQ ID NO: 2441 - DNA, 972 bp, Haemophilus influenzae
atgacaaaatccgcaaaaatcggcgtattacttgccaatctaggcacgccagatagcccgacaccgaagtcaattagccgttatttatggcaatttttaacggatcctcgcgtggtagatttaccccgttgcaaatggtatccactgctcaaagccattattttgccattacgttcaaaacgtatcgccaaaaattatcaagcaatctggacagaacaaggttcgcctttacttgccatgtcacgacaacaaaaagacgcattacaagcctatttagataagcaaaacatcgatacacaagtagaaattgccatgacgtacggcaatccatcgatacaaagtgcggtaaaaaatttgcttaaaaatcaagttgaacgaattattgttttgccactttatccgcaatactctagctcaaccacgggtgcagtatttgatgctttcgctaacgcccttaaagaagaacgaggattagtgccttttgatttcatccattcttatcatgttgatgaaaattacattaacgccttagccgattccataaaagtgcggttaaaacccgatgagtttttactattttcttatcacggtattcctttgcgttatgaaaaaatgggcgattattatcgtgaacattgtaaacaaacgactattgcagtggttaataaactgggcttaacagaaaaccaatggggaatgacgtttcaatcgcgctttgggcgtgaagaatggctacagccttacacagataaatttcttcaaaatgcagcaccacaaggcattcataaaatagctgtcatttgtccaggtttctccgtagattgtttagaaaccattgaagaaattgacaaagaaaatcgagaaaattttctaaaaaatagtgggcaatcttatcaatatattcccgcacttaatgtagagcatgcacatattgaaatgatgggaaaattgatcctagaaaaacttgcttaa

SEQ ID NO: 2442 - protein, 323 aa, Haemophilus influenzae
MTKSAKIGVLLANLGTPDSPTPKSISRYLWQFLTDPRVVDLPRCKWYPLLKAIILPLRSKRIAKNYQAIWTEQGSPLLAMSRQQKDALQAYLDKQNIDTQVEIAMTYGNPSIQSAVKNLLKNQVERIIVLPLYPQYSSSTTGAVFDAFANALKEERGLVPFDFIHSYHVDENYINALADSIKVRLKPDEFLLFSYHGIPLRYEKMGDYYREHCKQTTIAVVNKLGLTENQWGMTFQSRFGREEWLQPYTDKFLQNAAPQGIHKIAVICPGFSVDCLETIEEIDKENRENFLKNSGQSYQYIPALNVEHAHIEMMGKLILEKLA

SEQ ID NO: 2443 - DNA, 417 bp, Haemophilus influenzae
atgatttggcaaaaaaacttcacgctcgaaaacttaaatcaactctgctccaacagtgcagttagtcatcttggcattgaaatttctgcttttggcgaggattggattgaagcgacaatgccggtggattatcgtactatgcagccgtttggcttattgcatggcggggtttcggttgctttagctgaaacaattggttcccttgcgggttcgctttgtttagaagaaggcaaaactgcggtgggattggatattaacgccaatcatcttcgccctgttagttcaggtaaagtaaccgcgagagccacgccaattaatttaggcagaaatatccaagtttggcaaattgacatccgcacagaagagaataaactttgttgtgtttctagattaaccctttccgtaatcaatttatga

SEQ ID NO: 2444 - protein, 138 aa, Haemophilus influenzae
MIWQKNFTLENLNQLCSNSAVSHLGIEISAFGEDWIEATMPVDYRTMQPFGLLHGGVSVALAETIGSLAGSLCLEEGKTAVGLDINANHLRPVSSGKVTARATPINLGRNIQVWQIDIRTEENKLCCVSRLTLSVINL

SEQ ID NO: 2445 - DNA, 3084 bp, Haemophilus influenzae
atgttgccaaatctaaatcgcattcctcaagttgaacaatatgtacttgattatcttgatgatcttcaatgccaacattttgagggggatattgcgacaaactatgcagatagattaagtctggctacggataacagcgtttaccaacaacttccacaagcgattctttttccaaaaaatgttgctgatatagtgcggataaccaaattggcaaatttacctgaatatcaatcaatcagctttacgcctcgcggtggaggcactggcactaatggtcaatccattaataacaatataatagtggatctttctcgtcatatgactgccatcttagaactcaatgtaaaagaacgttgggttaaagtacaagcaggtgtcgtaaaagatcaacttaatcaatttttaaaaccacatggtttattctttgctccagagctatccaccagcaatcgagcgactttaggtggaatgattaataccgatgcctctgggcaaggttcattacaatacggtaaaacctctaatcatgttttggcattgcgtgccgtgttaatgaacggtgaaattttagatacaagtgcggtcaattctgttgatgttttagaaaacatcgatgcgcttaaattaagtgagagtagcaaaaagctccaccaaacaatcgcgcaacactgtaaagaaaaaagagcggctatcattaaagatctgccacaacttaaccgttttttaacgggatacgatctgaaaaatgtattcaatgaagatgaaagtgaattcaatctcacgagaattctcactggctctgaaggttctctcgcatttatttgcgaagccaaactcaatcttctgcctataccgcaatatcgcacgctcatcaatattaaatatcgttcttttgatgcagcattacgcaatgccccttttatggtgaaagccaatgcgctttctgtggaaaccgttgattccaaagtcttaaacctcgccaaacaagatattatttggcactctgtgaatgaacttcttacagaagatgaaaaagatccaattcttggtttaaatattgtggaatttgctggtaataataaagaaaaaatagacctccaagtcaccgcactttgtcgcttacttgatgaaaaaattgaacacaaccaagatcacattattggctatcaaatttgttctgatttaccttctatcgagcgtatttatgcaatgcgaaaaaaagcagtgggcttacttggtaatgcaaaaggtgtagctaaaccgattcctttcgtggaagatacttgtgtccccccagaaaatcttgcggattacattagtgaatttcgcgctttattagaccagcaccatttacaatatggcatgtttggtcacgtggatgcaggcgtattgcacgttcgccctgcacttgatttatgcgataaagaacaagtgaaattattcaaacaaatttcagatgaagtggcagaacttacaattaaatatggcggattactctggggagaacatggaaaaggcgtgcgttcccattacggcgaaaaattctttaccccagaactctggcacgaacttcgttatatcaaaaccttattcgatccgaacaatcgcttaaatcccggcaaaatctgtacgcctttggattccaaagatgaactttattctattctttcgccgatgcgagctgataaggatcgccaaattcctatccaagtgcgtgatgaatttaagggtgcaatgaactgcaatggaaacgggttatgttttaattttgatgaacacagcattatgtgcccatcgatgaaagtcagtaaaaaccgtgtattttcgccgaaaggtcgcgcagccatggttcgagaatggcttcgattgatggcaaatgaaaatgtttcgcccgcacaattagacttccgtaaaacagaaataaaactaaccgcacttgtaaaaagactaagcaatacagttcaaaaatggcaaggggattatgatttttctcacgaagtaaaagctgcaatggacacttgccttgcttgtaaagcctgtgcgagccaatgcccgattaaaatcgatgtaccaagtttccgtgcgaaattctttcatttttatcacagccgctacttacgccccgcaaaagaccacattgtggcaaatttagaaatcgctgcgccttatatggcaaaacaggcaaaattctttaattattttaccaagctaaaagtcacgcaaacattagtggaaaaaacattaggaatgactgatttgcctttgctttctgaacccaatttgcaacaacagctggtagaaattcattatcaaggcaaatccttggaagaattggaagatctaagtgcggtagaaaaaaacgatattttatttattgtgcaagatccttatacctcttactatgatgcgaaagtggtacgcgattttgttatgcttacgcaggaattaggctttacaccaattttgttgccatttaaaccaaacggcaaagcaatgcacattaaaggtttcttaaaacgctttagcaaaacagcacaaaatcaagccgagtttttaaatcgaatggcaaaattaggcattcctcttgtgggcgttgatccagccatcgtgctgtcttatcgagatgaatacaaagaagcactacaagaaaaacgtggcgactttcacgttctcaccgcacacgaatggttaaaacaaagattacaaaatacggcattacaagataaactgaaaaacatcgccaaaactgaccgcactttcgattggtatttattcccgcattgtacggaatctacttttatgccgaatagtccaaaagaatggcaagaaatttttggaagatttggacaacaacttaatgtagaaaaagtaggatgttgcggtatggctggtgtatttggacatgaaatacaaaatcaaaaaatgagccgagaaatctacgatgtatcctggcataaaaaactgcatgaaaaagatccgcacttttgtttagcaactggttattcttgccgcagtcaggtaaaacgttatgaacatgtggtgctaaaacaccctgtgcaggcattattagaaattttagcgtaa

SEQ ID NO: 2446 - protein, 1027 aa, Haemophilus influenzae
MLPNLNRIPQVEQYVLDYLDDLQCQHFEGDIATNYADRLSLATDNSVYQQLPQAILFPKNVADIVRITKLANLPEYQSISFTPRGGGTGTNGQSINNNIIVDLSRHMTAILELNVKERWVKVQAGVVKDQLNQFLKPHGLFFAPELSTSNRATLGGMINTDASGQGSLQYGKTSNHVLALRAVLMNGEILDTSAVNSVDVLENIDALKLSESSKKLHQTIAQHCKEKRAAIIKDLPQLNRFLTGYDLKNVFNEDESEFNLTRILTGSEGSLAFICEAKLNLLPIPQYRTLINIKYRSFDAALRNAPFMVKANALSVETVDSKVLNLAKQDIIWHSVNELLTEDEKDPILGLNIVEFAGNNKEKIDLQVTALCRLLDEKIEHNQDHIIGYQICSDLPSIERIYAMRKKAVGLLGNAKGVAKPIPFVEDTCVPPENLADYISEFRALLDQHHLQYGMFGHVDAGVLHVRPALDLCDKEQVKLFKQISDEVAELTIKYGGLLWGEHGKGVRSHYGEKFFTPELWHELRYIKTLFDPNNRLNPGKICTPLDSKDELYSILSPMRADKDRQIPIQVRDEFKGAMNCNGNGLCFNFDEHSIMCPSMKVSKNRVFSPKGRAAMVREWLRLMANENVSPAQLDFRKTEIKLTALVKRLSNTVQKWQGDYDFSHEVKAAMDTCLACKACASQCPIKIDVPSFRAKFFHFYHSRYLRPAKDHIVANLEIAAPYMAKQAKFFNYFTKLKVTQTLVEKTLGMTDLPLLSEPNLQQQLVEIHYQGKSLEELEDLSAVEKNDILFIVQDPYTSYYDAKVVRDFVMLTQELGFTPILLPFKPNGKAMHIKGFLKRFSKTAQNQAEFLNRMAKLGIPLVGVDPAIVLSYRDEYKEALQEKRGDFHVLTAHEWLKQRLQNTALQDKLKNIAKTDRTFDWYLFPHCTESTFMPNSPKEWQEIFGRFGQQLNVEKVGCCGMAGVFGHEIQNQKMSREIYDVSWHKKLHEKDPHFCLATGYSCRSQVKRYEHVVLKHPVQALLEILA

SEQ ID NO: 2447 - DNA, 1062 bp, Haemophilus influenzae
atgaaaaaaactgcaatcgcattagtagttgctggtttagcagcagcttcagtagctcaagcagctccacaagaaaacactttctacgctggcgttaaagctggtcaagcatcttttcacgatggacttcgtgctctagctcgtgaaaagaatgttggttatcaccgtaattctttcacttatggtgtattcggtggttatcaaattttaaatcaaaataacttaggtttagcggttgaattaggttacgacgatttcggtcgtgctaaaggtcgtgaaaaaggtaaaactgttgctaaacacactaaccacggtgcgcatttaagcttaaaaggtagctatgaagtgttagaaggtttagatgtttatggtaaagcaggtgttgctttagttcgttctgactataaattgtacaataaaaatagtagtactcttaaaaacctaggcgaacatcacagagcacgtgcctctggtttatttgcagtaggtgcagaatatgcagtattaccagaattagcagttcgtttagaataccaatggctaactcgcgtaggtaaataccgccctcaagataaaccaaataccgcacttaactacaacccttggattggttctatcaatgcgggtatttcttaccgttttggtcaaggcgcagcgccagttgttgcagcacctgaagttgtaagcaaaactttcagcttaaactctgatgtaactttcgcatttggtaaagcaaacttaaaacctcaagcacaagcaacattagacagcatctatggcgaaatgtcacaagttaaaagtgcaaaagtagctattgctggttacactgaccgtattggttctgacgcgttcaacgtaaaactttctcaagaacgtgcagattcagtagctaactactttgttgctaaaggtgttgcagcagacgcaatctctgcaactggctacggtaaagcaaacccagtaactggcgcaacttgtgaccaagttaaaggtcgtaaagcacttatcgcttgtcttgctccagaccgtcgtgtagaaatcgcggtaaacggtactaaataa

SEQ ID NO: 2448 - protein, 353 aa, Haemophilus influenzae
MKKTAIALVVAGLAAASVAQAAPQENTFYAGVKAGQASFHDGLRALAREKNVGYHRNSFTYGVFGGYQILNQNNLGLAVELGYDDFGRAKGREKGKTVAKHTNHGAHLSLKGSYEVLEGLDVYGKAGVALVRSDYKLYNKNSSTLKNLGEHHRARASGLFAVGAEYAVLPELAVRLEYQWLTRVGKYRPQDKPNTALNYNPWIGSINAGISYRFGQGAAPVVAAPEVVSKTFSLNSDVTFAFGKANLKPQAQATLDSIYGEMSQVKSAKVAIAGYTDRIGSDAFNVKLSQERADSVANYFVAKGVAADAISATGYGKANPVTGATCDQVKGRKALIACLAPDRRVEIAVNGTK

SEQ ID NO: 2449 - DNA, 324 bp, Haemophilus influenzae
atggaaaccttagacaaaatcaaaaagcaaattagtgaaaatcccattcttatttatatgaaaggttcgccaaaattaccatcttgtggtttttctgctcgtgcatctgaggcattaatgcactgcaaagtgccttttggttatgtggatattttgcaacatccagatattcgcgctgaattaccaacatatgcaaattggccaactttcccacaattatgggttgagggagaattaattggtggttgtgatattattttagaaatgtatcaagcaggcgaattgcaaactttattagctgaagtggcagcaaagcacgcttaa

SEQ ID NO: 2450 - protein, 107 aa, Haemophilus influenzae
METLDKIKKQISENPILIYMKGSPKLPSCGFSARASEALMHCKVPFGYVDILQHPDIRAELPTYANWPTFPQLWVEGELIGGCDIILEMYQAGELQTLLAEVAAKHA

SEQ ID NO: 2451 - DNA, 1101 bp, Haemophilus influenzae
atgcagtacatcaacattgccaatcgtggcgtaaaatccttatccccttatcaagcaggcaaacccattgaggaattagaacgagaacttggtatttccaatatcgttaaacttgcctcaaacgaaaacccatttggttttccagaaagtgcaaaaaaagcaattatcgaacaattagataaactaactcgttatccagatgcgaatggctttgaattaaaacaaactatcgcaaaaaaatttggcgttcaaccaaatcaaattacgcttggaaatggctcaaatgatttattagaactttttgctcacactttcgcaacggaaggcgatgaaatcatttattcacaatatgcctttattgtttatcctttagtgactaaagcgataaatgcaattgcaaaagaaattccagctaaaaattgggggcacgatttacaaggatttttaaccgcactttctgataaaacaaagctcatttacattgctaatcccaataatccaacgggtaattttttaacatcgcaagaaattgaagattttttagcaaaagtccccgaaaatgtaatcgtggtattagatgaagcctacacagaatttactagatctgaagaacgagtggactctttcagtttattaaaaaaatattcaaatttaattatttcacgttctctttctaaagcctatggcttggcaggcttacgcattggttatgcggtatctaatcctgaaatcgcagatttattaaatcgagttcgacagccatttaactgtaattcattggcattaaccgctgctgttgccgtaatgaatgatgatgaatttgttgaaaaagtcgctgaaaataatcgaatagaaatgcgacgttatgaagacttttgtcaaaaaaatcaattggattatattccctctaagggaaattttataaccattgatttcaaacaacctgccgcaccaatttatgatgcgttgttacgagaaggcgtaatcgttcgcccaattgctggttatggcatgccaaatcatttacgtataagtattggtttacctgaagaaaacgataaatttttcaccgcactttctaaggtattaaagtttgcttaa

SEQ ID NO: 2452 - protein, 366 aa, Haemophilus influenzae
MQYINIANRGVKSLSPYQAGKPIEELERELGISNIVKLASNENPFGFPESAKKAIIEQLDKLTRYPDANGFELKQTIAKKFGVQPNQITLGNGSNDLLELFAHTFATEGDEIIYSQYAFIVYPLVTKAINAIAKEIPAKNWGHDLQGFLTALSDKTKLIYIANPNNPTGNFLTSQEIEDFLAKVPENVIVVLDEAYTEFTRSEERVDSFSLLKKYSNLIISRSLSKAYGLAGLRIGYAVSNPEIADLLNRVRQPFNCNSLALTAAVAVMNDDEFVEKVAENNRIEMRRYEDFCQKNQLDYIPSKGNFITIDFKQPAAPIYDALLREGVIVRPIAGYGMPNHLRISIGLPEENDKFFTALSKVLKFA

SEQ ID NO: 2453 - DNA, 1089 bp, Haemophilus influenzae
atgtcacaagtctttaattttagcgcaggccctgcgatgattttcccagaagtgttgcaaaaagcacaaaatgaacttataaactggctcaatcaaggtgtttctgtaatggaagtaagccatcgcggaaagtattttatggaactcgttacccaagcggaaaaagatctacgtgaggtttacaatattcccgataactatcgtgcacttttcttacaaggtggcgctcgcggtcaatttgccgcgattccgatgaacttaatcggtaaaaaaggcaaagccctttatttaaatagtgggcattggtcagctacagcagcaaaagaagcaagaaattttgcagaaattgatgaaatcactatcgtagaaaatggcgaacagactcgaattaccgatcttgattttagccatatcgctgatcaatatgactacgttcattattgcccgaatgaaaccatcagtggtgtggagatttttgatgtgccaaatgtaggcaatgccgtattggtcgcggatatgtcttcaaatattctttcacgtcaaatcgatatcagtaaatttggggtaatttatgcaggtgcgcaaaaaaatcttggccctgcgggtattacgttagtgattattcgtgatgatttaatcggtaatacacgtaaagaaaccccatctatttggaattatgcaactcaacgtgatgcagactcaatgatcaacacgcccccaacttttgcgtggtatttatgttccctcgtatttaaacatcttaaagaaataggcggcttagaaataatcgaaaaacgtaatgcactaaaagcacaaactctttatgattatattgattcgagcaaactttatcgcaatgtggtagcaaaagaaaaccgctcaacaatgaatgtcactttcatcacaggtaatcctgaattagatgcaaaatttgtcgcagagtctactgctgcgggcttgcaagccttgaaaggtcataaggttttaggtggaatgcgcgcatctatttataacgcaatgtcgcaaaatggtgttgaggcactcatttcatttatgaaaaaatttgaaactgaaaatctgcctcaatag

SEQ ID NO: 2454 - protein, 362 aa, Haemophilus influenzae
MSQVFNFSAGPAMIFPEVLQKAQNELINWLNQGVSVMEVSHRGKYFMELVTQAEKDLREVYNIPDNYRALFLQGGARGQFAAIPMNLIGKKGKALYLNSGHWSATAAKEARNFAEIDEITIVENGEQTRITDLDFSHIADQYDYVHYCPNETISGVEIFDVPNVGNAVLVADMSSNILSRQIDISKFGVIYAGAQKNLGPAGITLVIIRDDLIGNTRKETPSIWNYATQRDADSMINTPPTFAWYLCSLVFKHLKEIGGLEIIEKRNALKAQTLYDYIDSSKLYRNVVAKENRSTMNVTFITGNPELDAKFVAESTAAGLQALKGHKVLGGMRASIYNAMSQNGVEALISFMKKFETENLPQ

SEQ ID NO: 2455 - DNA, 345 bp, Haemophilus influenzae
atggaaattgtgaataaacaatcttttcaagatgtgttggaatacgtgcgtatgtatcgtttaaaaaatagaattaaacgagatatggaagacaataatcgtaagattcgcgataaccaaaaacgcatattgttattggataatttaaatcaatatattcgtgatgatatgactattgcagaagtacgcggaattattgaaagtatgcgtgatgattatgaaagccgtgtggatgattacacaattcgcaatgctgaactttctaagcaacgccgtgaagcgagtacgaaaatgaaagaacagaaaaaagcacacgcagaattattgaaaaatgctgaaaaataa

SEQ ID NO: 2456 - protein, 114 aa, Haemophilus influenzae
MEIVNKQSFQDVLEYVRMYRLKNRIKRDMEDNNRKIRDNQKRILLLDNLNQYIRDDMTIAEVRGIIESMRDDYESRVDDYTIRNAELSKQRREASTKMKEQKKAHAELLKNAEK

SEQ ID NO: 2457 - DNA, 567 bp, Haemophilus influenzae
atgttccctctatttgaaaccctttgtattgaaaacgggaaaattcaaaatatcgatttacaccaagtgcgatatgaacatagtttgcgtgaatattatggtaaaagtgcggtgaaaatttttaatcttttttcactcattcaacttccaacgcccttacaaaatcgattagttcgctgccgcattgattacaatgccgaaaccacacaaattcaatattttgaataccaacgaaaaatctaccgcacttttcaacctgtaatttgtgatgacattgaatatagtttgaaatatttagatcgcagtttaattaatacattatttgctcaacgtggtgcttgtgatgaaattatgattatcaaaaatggaaaagtgacagattgttccatcggtaatttaatttttcgccaaggaaaaaaatggtacacgccagacacgccattgcttttaggcacacaacgagaaaaattattacaagaagggaaaattcaagaacgcacaatattccaagaagatattgtcaattttgatgaaattaaaatcattaacgcaatgaatagcttataa

SEQ ID NO: 2458 - protein, 188 aa, Haemophilus influenzae
MFPLFETLCIENGKIQNIDLHQVRYEHSLREYYGKSAVKIFNLFSLIQLPTPLQNRLVRCRIDYNAETTQIQYFEYQRKIYRTFQPVICDDIEYSLKYLDRSLINTLFAQRGACDEIMIIKNGKVTDCSIGNLIFRQGKKWYTPDTPLLLGTQREKLLQEGKIQERTIFQEDIVNFDEIKIINAMNSL

SEQ ID NO: 2459 - DNA, 885 bp, Haemophilus influenzae
ttgatttgtcctctcgaaaattctgcacaacaaggcatttattttgatattttaggcaaaagaaattgcacaatttctccacggcctctccctcttaattttaccaaacatccaatgcctttctcgcattatcaacaaggttttaaacttgttcaaagtgaattacaaaaaggtaattcttatttattaaatctcacctaccccactgaaatttcaggtaatctgtcacttgaacaaatttttcatcaaaccaatgcaccttataaattgtggttacaagatcaattcgtttgcttttcacctgaatgttttgtcaatattcatgacaacaatatttttacctatcccatgaaagggacaattaatgcctctctgcccgatgcagaaaatcagttactcacaaatgaaaaagaacaacgcgaacattacacaattgttgatttaatgcgtaatgatttatccatggtggcagaacacattcaagtgaaaaaatttcgttatatcgatcgtatcaaaacccagaaaggcgaaatactgcaaaccagttctgaaatttacggaaaattgaatgaaaactggcaaaatcaaattggggatattttagcgaaactgttgcctgctgggtcgattagtggcgcaccaaaagaaaaaaccacacaaattattcaacaagcagaaaaacaaaaacgcggttattacacaggaatttttggcatatttgatggcaaaacactacaaagtgcggtggcaattcgatttatttctcaagtagatgaaaaattttattttcatagtggaggtggaattaccattcatagcaatgtgcaagatgaatatgaagaattgttagaaaaagtctatttgccgattgaaggtgctgattaa

SEQ ID NO: 2460 - protein, 294 aa, Haemophilus influenzae
MICPLENSAQQGIYFDILGKRNCTISPRPLPLNFTKHPMPFSHYQQGFKLVQSELQKGNSYLLNLTYPTEISGNLSLEQIFHQTNAPYKLWLQDQFVCFSPECFVNIHDNNIFTYPMKGTINASLPDAENQLLTNEKEQREHYTIVDLMRNDLSMVAEHIQVKKFRYIDRIKTQKGEILQTSSEIYGKLNENWQNQIGDILAKLLPAGSISGAPKEKTTQIIQQAEKQKRGYYTGIFGIFDGKTLQSAVAIRFISQVDEKFYFHSGGGITIHSNVQDEYEELLEKVYLPIEGAD

SEQ ID NO: 2461 - DNA, 582 bp, Haemophilus influenzae
atgaaattactcatcattaataatcacgattcttttacttttaacttggtggatttaattcgaaaattaaatgtgccttatgatgttttaaacgtggaagatttaaaggaaaatacagcggaaaattatagccatatattgatttcgccagggcctgatataccacgcgcttatccacaacttttttccatgttggaaaaatattatcagcaaaaatctattttaggtgtgtgtttagggcatcaaaccttatgtgaattttttggtggtacattgtataacttagagaatgttcgtcacgggcagaaacgaacattaaaagtgcggtcaaattctccattgttttttgatcttccaactgaatttaatatcgggctatatcattcttggggcgtacaggaagaagattttcctagctgcctagaaatcaccgcactttgtgatgaagatgtagtgatggcaatgcaacataaatctttgccaatttatagtgtccagtttcatccagaatcttatatgtcagactttggagagcaaattttgcgtaattggttggcgattcctcccacaactaacccataa

SEQ ID NO: 2462 - protein, 193 aa, Haemophilus influenzae
MKLLIINNHDSFTFNLVDLIRKLNVPYDVLNVEDLKENTAENYSHILISPGPDIPRAYPQLFSMLEKYYQQKSILGVCLGHQTLCEFFGGTLYNLENVRHGQKRTLKVRSNSPLFFDLPTEFNIGLYHSWGVQEEDFPSCLEITALCDEDVVMAMQHKSLPIYSVQFHPESYMSDFGEQILRNWLAIPPTTNP

SEQ ID NO: 2463 - DNA, 1155 bp, Haemophilus influenzae
atgtctagttatttatttacatctgaatcagtctctgaagggcatccagataaaattgccgatcaaatttctgatgcggtacttgatgaaatcctaaaacaagatccaaaagcacgagtagcttgtgaaacttacgtaaaaaccggtatggcattggttggtggggaaatcaccacatcagcatgggttgatattgagaatttaacccgtaaagtgatttgtgatattggttatgaacattctgaaatgggttttgatggtcattcttgtgcggtgcttaatgcgattggtaaacaatctgcagatattaatcaaggcgttgatcgtgaaaatccattagatcaaggcgcaggcgaccaaggtattatgtttggttatgccaccaatgaaacggatgtattaatgcctgcagctattacttatgcacatcgtttaatggaaaaacaatctgaagtgcgtaaaagcggtaaattagcatggttacgcccagatgcgaaaagccaagtcacgttaaaatatgaagataataaaattgttggtgtggatgcggttgtgctttcaactcaacattctgaagaggttagccaaaaagatttacatgaaggtgtgatggaagaaattatcaaacctgtattaccaagtgaatggctttctaaagaaacaaaattcttcattaacccgactggtcgttttgttatcggtgggccaatgggcgattgtggtttaactggtcgtaaaattatcgtggatacttacggtggtgctgctcgtcacggtggtggcgcattctcaggaaaagatccatctaaagtagatcgttctgcagcttatgctgcacgctatgtcgcaaaaaatattgttgcagcaggtcttgcagatcgttgtgaaatccaactttcttatgcgattggtgtggctgatccaacatctatcatggtcgaaacctttggaactggaaaagttgcgaatgaattattagtgtcattagttcgtgagttttttgatttacgtccttatggcttaattaaaatgttagatttaatccaaccaatctatcgtgaaacggcggcttatggccatttcggtcgtgagcaattcccttgggaaaaagtggatcgcgcagaagatttacgtattgcggcaggtttaaaataa

SEQ ID NO: 2464 - protein, 384 aa, Haemophilus influenzae
MSSYLFTSESVSEGHPDKIADQISDAVLDEILKQDPKARVACETYVKTGMALVGGEITTSAWVDIENLTRKVICDIGYEHSEMGFDGHSCAVLNAIGKQSADINQGVDRENPLDQGAGDQGIMFGYATNETDVLMPAAITYAHRLMEKQSEVRKSGKLAWLRPDAKSQVTLKYEDNKIVGVDAVVLSTQHSEEVSQKDLHEGVMEEIIKPVLPSEWLSKETKFFINPTGRFVIGGPMGDCGLTGRKIIVDTYGGAARHGGGAFSGKDPSKVDRSAAYAARYVAKNIVAAGLADRCEIQLSYAIGVADPTSIMVETFGTGKVANELLVSLVREFFDLRPYGLIKMLDLIQPIYRETAAYGHFGREQFPWEKVDRAEDLRIAAGLK

SEQ ID NO: 2465 - DNA, 528 bp, Haemophilus influenzae
ttgcttttaccgatgacatcaatatcactcattccatttcgtcatttaaaaatgcaagtgcaacgcaaattgaatcagtctttgcagcttgcagaggcttattttaagcgaaaatttacaatgcctgaggtaaattatgagttacgtggcataaaggcaggcgtggcttacctgcaaaaaaatgaaataaaatttaaccgcactttattgcaagaaaatacggatgaatttattcgacaagtcgtgccacacgagcttgcgcatttgattgtgtatcaaatgtttggtcgcgtaaaaccacacgggaaagagtggcagcttgtaatgaatgaaatttttaagcttcccgcagacacttgccatcaatttgatataaaaaatgtgcaaggtaaaacctttgaatatcgttgtgcttgccaaacccattttctaactattcgtcggcataacaaaataatgaaagaaaacatcgaatatttgtgtaaaaaatgtaagggaaaattagtttttgtcgatgatgaagaataa

SEQ ID NO: 2466 - protein, 175 aa, Haemophilus influenzae
MLLPMTSISLIPFRHLKMQVQRKLNQSLQLAEAYFKRKFTMPEVNYELRGIKAGVAYLQKNEIKFNRTLLQENTDEFIRQVVPHELAHLIVYQMFGRVKPHGKEWQLVMNEIFKLPADTCHQFDIKNVQGKTFEYRCACQTHFLTIRRHNKIMKENIEYLCKKCKGKLVFVDDEE

SEQ ID NO: 2467 - DNA, 513 bp, Haemophilus influenzae
atgaaaaaatctttattagcagttattgttggtgcatttgcctttgcttctgttgcagatgcgaatatctatgctgaaggcgatatcggtttatctcaaactaaagcaaacggtagtaacaatacaagagttgaacctcgcgtatccgtgggttataaagtaggaaatacacgtgttgcgggtgattatactcatcatggaaaagttgatggcacaaaaattcaaggtttaggtgcatcagtattatatgattttgacacgaattctaaagtgcaaccttatgttggtgctcgtgtagcgactaatcaatttaaatacaccaatcgcgcagaacaaaagtttaaaagttcttctgatattaagctcggatatggggttgtagcaggtgcaaaatataagttagatggcaactggtacgcaaatggtggagttgagtacaatcgtttaggtaattttgatagtaccaaagttaataactatggtgcaaaagttggtgtggggtacggattctaa

SEQ ID NO: 2468 - protein, 170 aa, Haemophilus influenzae
MKKSLLAVIVGAFAFASVADANIYAEGDIGLSQTKANGSNNTRVEPRVSVGYKVGNTRVAGDYTHHGKVDGTKIQGLGASVLYDFDTNSKVQPYVGARVATNQFKYTNRAEQKFKSSSDIKLGYGVVAGAKYKLDGNWYANGGVEYNRLGNFDSTKVNNYGAKVGVGYGF

SEQ ID NO: 2469 - DNA, 342 bp, Haemophilus influenzae
ttggaaaatgcttataaaacagagcgtcaaaattatgctgatttggcagaattacgtaatattctttacgatttgccgaaaaaaaaagaggaagttgctgggttaaaaagcaatatggaacagttgaaaaccgcagctaatccaaatcaagctaagattgacaacgcgactaaatcttatgaaacagctaaaaataaattagtttcaacttggaaaggcactgcgggttcggtttcagtggggaataaaataagaggcataacccgccaaattactggcgtagctgcagggactttatcgaggacaatctgctgttgcagctggagtccgttatacgcctaa

SEQ ID NO: 2470 - protein, 113 aa, Haemophilus influenzae
MENAYKTERQNYADLAELRNILYDLPKKKEEVAGLKSNMEQLKTAANPNQAKIDNATKSYETAKNKLVSTWKGTAGSVSVGNKIRGITRQITGVAAGTLSRTICCCSWSPLYA

SEQ ID NO: 2471 - DNA, 684 bp, Haemophilus influenzae
atgtttcaagaatatttaagcgtgatcgtacaagggattccaacgagtttgttgcttacagtcgtatccttactgattgctttctttttagccttatttcttacttttttactttcaatggaaaataaatggataaaaagtgcggttaatttataccttactttattcacaggcacgccactgttagtacagttctttttaatttatgcaggacccggtcaattccaatggattattgacagcccattatggtatgtcttatccaatgcgtggttctgtgctgcattagctttagcgctaaacagtgcagcctattccacccaattatttcacggtgcagtgaaagccattcccaaaggacaatgggaaagttgtggcgcattaggattaaaccgcatacaaactttaaaaattttaattccttatgccttaaaacgtgcgttgccgtcttacagtaacgaaattattttggtatttaaaggcacggcattagcatccaccattacgattatggatattatgggttacgcacgccaactttatgggacagaatatgatgcaatcacaatttacggcattgcgggcggtatctatttaattatcacaggcattgcaacattattactacgtaaattagagaaaaaagtattggcatttgaacgttttgaagtaagcaaagcataa

SEQ ID NO: 2472 - protein, 227 aa, Haemophilus influenzae
MFQEYLSVIVQGIPTSLLLTVVSLLIAFFLALFLTFLLSMENKWIKSAVNLYLTLFTGTPLLVQFFLIYAGPGQFQWIIDSPLWYVLSNAWFCAALALALNSAAYSTQLFHGAVKAIPKGQWESCGALGLNRIQTLKILIPYALKRALPSYSNEIILVFKGTALASTITIMDIMGYARQLYGTEYDAITIYGIAGGIYLIITGIATLLLRKLEKKVLAFERFEVSKA

SEQ ID NO: 2473 - DNA, 666 bp, Haemophilus influenzae
atgttttctgactttctttctttaatgtttaccgctgctctaatgactttagggcttgcggtctgttcattgctcttaggcttatttttaagccttatttttgccgtgcttgaagcaaatcgctttgttggcaagccgatgacagtatttgtggcattattacgtggcttacccgaaattattgttgtattacttgtctattttggttctactgaattagtagaaatgctgacaggagaatacattgaatttggggcatttggctgtggtgtgtttgcgctttctctcatttttgcagcttatgcttcacaaacattacgcggtgcaattcaagccataccaaaaggacaatgggaatcaggtgcagcgttaggcttaagcaaaagctatacgttcattcatattgttatgccacaagtatggcgtcacgccttacctggtttaagcacccaatggcttgtattgctaaaagatacggcattggtttcattaattggtgtggacgatttgatgcaccaagcggatctgattaataccaacacccatcagccttttacttggtatggtattgctgcgttaatttatttggcagtgacattaattagccaagttggtattcgaaaattagagctgcgttttactcgttttgaaaggggcgtgaaataa

SEQ ID NO: 2474 - protein, 221 aa, Haemophilus influenzae
MFSDFLSLMFTAALMTLGLAVCSLLLGLFLSLIFAVLEANRFVGKPMTVFVALLRGLPEIIVVLLVYFGSTELVEMLTGEYIEFGAFGCGVFALSLIFAAYASQTLRGAIQAIPKGQWESGAALGLSKSYTFIHIVMPQVWRHALPGLSTQWLVLLKDTALVSLIGVDDLMHQADLINTNTHQPFTWYGIAALIYLAVTLISQVGIRKLELRFTRFERGVK

SEQ ID NO: 2475 - DNA, 720 bp, Haemophilus influenzae
atgaaaaaaacattattaactgccattttattgggatcatctattgctgtaagcgcacaagaactcacttttgcaatggaacctagctatccaccatttgaaaccacaaatgcaaaaggcgaaattattggttttgatgtggatgtggcgaatgcaatttgtcaagaaattcaagtaacctgtaaattcaagagcgaaacctttgattcattaattccaagtttaaaagcaaaacgttttgatgcagcaatttccgcaatcgatattaccgatgctcgtgcaaaacaagtgttattctctgatgcgtattacgatagctctgcaagctatgttgctcttaaaggcaaagcaaccttagaaagtgcaaaaaatataggtgttcaaaatggtacaacattccaacaatataccgtagcagaaaccaagcaatatagtccaaaatcctatgcaagtttacaaaatgccattttagacttaaagagcggtcggattgacattattttgggcgataccgcagtgctttccgatatgatttccaaagagccagaaattcaatttataggcgaaaaagtaaccaataaaaaatattttggtaatggtttaggtattgcaatgcacaaatcaaacaaagatttggctgcacaattaaacaaaggtttagctgcaattaaagcaaatggcgaataccaaaaaatctatgataaatggatgacaaaataa

SEQ ID NO: 2476 - protein, 239 aa, Haemophilus influenzae
MKKTLLTAILLGSSIAVSAQELTFAMEPSYPPFETTNAKGEIIGFDVDVANAICQEIQVTCKFKSETFDSLIPSLKAKRFDAAISAIDITDARAKQVLFSDAYYDSSASYVALKGKATLESAKNIGVQNGTTFQQYTVAETKQYSPKSYASLQNAILDLKSGRIDIILGDTAVLSDMISKEPEIQFIGEKVTNKKYFGNGLGIAMHKSNKDLAAQLNKGLAAIKANGEYQKIYDKWMTK

SEQ ID NO: 2477 - DNA, 732 bp, Haemophilus influenzae
atggctattcgtgttaaaaatctcaatttcttttacggttcatcacaaacgttatttgatattaaccttgaagcagaagaaggcgataccgttgtgttgctgggcccaagtggtgcaggcaaaagtacattaattcgcacattaaatttgttagaagtgccaaagtctggtgaattaagtattgcaaataatgattttaatttatccaatgcaatggcaaatcccaaagcaatccgacaattacgtcaagatgtaggaatggtttttcaacaatatcatctttggccgcacttaacggtaattgaaaacctaattgaagcaccaatgaaagtgcgtggtgtgagtgaaagtgaagcgaaaaccgatgcaatggaattgttaaaacgtttacgtttagaacaacttgccgatcgctttccattgcatttatcaggcggtcagcaacaacgtgttgcaatagcgcgcgccctgatgatgaagccacaagttctattatttgatgaaccaacggctgcgctagatccagaaattacagcgcaagttgtagatattattaaagaattacaagaaactggcattacgcaagtgattgtaacccacgaagtcaatgtggcgcaaaaagtagcgacaaaagtcgtctatatggaacaaggtaaaatcgtcgaaatgggatcggctgattgctttgaaaatccaaaaacggaacaatttaaacactatctttctcactag

SEQ ID NO: 2478 - protein, 243 aa, Haemophilus influenzae
MAIRVKNLNFFYGSSQTLFDINLEAEEGDTVVLLGPSGAGKSTLIRTLNLLEVPKSGELSIANNDFNLSNAMANPKAIRQLRQDVGMVFQQYHLWPHLTVIENLIEAPMKVRGVSESEAKTDAMELLKRLRLEQLADRFPLHLSGGQQQRVAIARALMMKPQVLLFDEPTAALDPEITAQVVDIIKELQETGITQVIVTHEVNVAQKVATKVVYMEQGKIVEMGSADCFENPKTEQFKHYLSH

SEQ ID NO: 2479 - DNA, 585 bp, Haemophilus influenzae
atgtatttagatcaaatcaaagcggaacttgtggaagcacaagatgtgttaaacaaatttatttctgacgaaaataacattaaattaattcaagaagcggcattattaatttcgaatagcttcaaacaaggaggcaaagtgctttcttgtggtaatggcggttcgcattgtgatgcgatgcattttgcagaagaattaacgggtcgttatcgtgaaaatcgcccaggttatcctgctattgcgatttcagatgtaagtcatttaagctgtgtaagtaatgattttggctatgaatatgtcttttctcgctatgttgaagcggtggggcaaaaaggcgatgtgttattcggtttatcaacctctggtaattcaaaaaatatcttaaatgctattgaagcggcaaaagcaaaaggaatgaaagtgattgcgatgacaggaaaagacggcgggaaaatggcaggattagcagatgttgaaattcgtgtaccccatttccgttatgcagatcgtattcaagaaatccatatcaaagttattcatattttaatgatgttaattgagtttgaaatggcaaaacaagcctaa

SEQ ID NO: 2480 - protein, 194 aa, Haemophilus influenzae
MYLDQIKAELVEAQDVLNKFISDENNIKLIQEAALLISNSFKQGGKVLSCGNGGSHCDAMHFAEELTGRYRENRPGYPAIAISDVSHLSCVSNDFGYEYVFSRYVEAVGQKGDVLFGLSTSGNSKNILNAIEAAKAKGMKVIAMTGKDGGKMAGLADVEIRVPHFRYADRIQEIHIKVIHILMMLIEFEMAKQA

SEQ ID NO: 2481 - DNA, 105 bp, Haemophilus influenzae
atgcaagtgctattaataaaaaatcccaaaaaaatttgggattttaaaaactcgattgaaatcaaccgcactttaggcttgttttgccatttcaaactcaattaa

SEQ ID NO: 2482 - protein, 34 aa, Haemophilus influenzae
MQVLLIKNPKKIWDFKNSIEINRTLGLFCHFKLN

SEQ ID NO: 2483 - DNA, 696 bp, Haemophilus influenzae
atgtctgaaaagttagatggcgtacgcggttattggaatggaaagcaattattaacccgacaagggcaacctttatcgccgccagcttatttcattaaggattttccgccttttgcgattgatggcgaattatttagtgagcgaaatcattttgaggaaatttcatccatcacaaaatcttttaaaggcgatggttgggcaaaacttaaattgtatgtttttgatgtgcctgatgcagagggcaatttatttgagcgtttagctaaattgaaagcctatttacttgaatatcctacaacttatattgaaattattaagcaaattcctgttaaagataaaacccatttatatcaatttcttgcacaagtcgaaaatttgcaaggcgagggcgttgttgtacgtaaccctaatgcatcttatgaacgtaagcgaagctcacaaattttaaaattgaaaacagcacgagatgaagaatgtacggttattgcacaccataaaggcaaaggacaatttgaaaatgtgatgggtgctttaacttgtacaaatcatcggggagaatttaaaatcggttcgggttttaatttaaacgaacgagaaaatccccctccgataggatctgtgattacttataaatatcgaggcattacgaatagtggaaaacctcgatttgcaacctattggcgagagaaaaaatga

SEQ ID NO: 2484 - protein, 231 aa, Haemophilus influenzae
MSEKLDGVRGYWNGKQLLTRQGQPLSPPAYFIKDFPPFAIDGELFSERNHFEEISSITKSFKGDGWAKLKLYVFDVPDAEGNLFERLAKLKAYLLEYPTTYIEIIKQIPVKDKTHLYQFLAQVENLQGEGVVVRNPNASYERKRSSQILKLKTARDEECTVIAHHKGKGQFENVMGALTCTNHRGEFKIGSGFNLNERENPPPIGSVITYKYRGITNSGKPRFATYWREKK

SEQ ID NO: 2485 - DNA, 984 bp, Haemophilus influenzae
atgacgaatgaagtaaaagaaaatacgccattattaaatgccattggcttaaaaaaatattaccctgtaaaaaaaggcttgtttgcaaaaccacagcaagtaaaagcgttggatggtgtctcttttcagcttgaacgaggtaaaactttagcagtcgtgggggaatctggttgtggaaaatcaacgctaggtcgtttattgacaatgattgaagaaccaaccaaaggcgaactttattacaaaggacataattttttagaaaatgattctgaaacaaaagcactacgtcgtaaaaaaattcaaatagtttttcaaaatccttacgcatcgttaaatccacgcaaaaagattggttcaattttggaagaaccattaatcatcaatacaaaactttccgccaaagaacgtcgagaaaaagttttatcgatgatggaaaaagtgggcttgcgcgctgaattttatgatcgttatccccacatgttctcaggcggacaacgccaacgtattgccatcgctcgtggtttaatgttagatcccgatgtcgttgttgccgatgagcctgtttctgcattggatgtttccgtgcgtgcacaagtactgaatttaatgatggatttacaagatgaattaggcttgtcttacgtattcatttcacacgatctttctgtggtagaacatatcgctgatgaagtgatggtaatgtatctaggtcgttgtattgaaaaagggacgacagaacaaattttctctaatcctcagcatccttataccaaagcgttactttcagcgacaccacgtttgtcgccaaacttgcgccgtgagcgtattaagctgacaggcgaattgccaagcccaattaatccgccaaaaggctgtgcatttaatcctcgttgttggaaagcgacagaaaaatgtcgtgaaaatcaaccgcacttggaacaatatactgatggaaaattaatcgcttgtttccatattgattaa

SEQ ID NO: 2486 - protein, 327 aa, Haemophilus influenzae
MTNEVKENTPLLNAIGLKKYYPVKKGLFAKPQQVKALDGVSFQLERGKTLAVVGESGCGKSTLGRLLTMIEEPTKGELYYKGHNFLENDSETKALRRKKIQIVFQNPYASLNPRKKIGSILEEPLIINTKLSAKERREKVLSMMEKVGLRAEFYDRYPHMFSGGQRQRIAIARGLMLDPDVVVADEPVSALDVSVRAQVLNLMMDLQDELGLSYVFISHDLSVVEHIADEVMVMYLGRCIEKGTTEQIFSNPQHPYTKALLSATPRLSPNLRRERIKLTGELPSPINPPKGCAFNPRCWKATEKCRENQPHLEQYTDGKLIACFHID

SEQ ID NO: 2487 - DNA, 993 bp, Haemophilus influenzae
atggcattattagacgtaaaagaactttctgttcactttggcgataaaaaaacgccatttaaagcagtggatcgcattagctatcaagtcgcacaaggcgaagtgcttggcattgtgggagaatcaggttcgggtaaatctgtgagttctctcgcaattatgggattaattgatcatcctggacgtgtatctgctgaatccttgcaatttgaaaatactgatttactcactttagagagtaaagctaaacgccagcttattggtgctgatgtagcaatgattttccaagatccgatgacaagtttgaatcctgcttatactgtgggcttccaaattatggaagcgttaaaaactcacgagggcggcacaaaaaaggcaagaaaagaccgcactttagagcttttaaaattggtcggtattcctgatcctgaatctcggattgatgtttatccccatcagctgtctggtggaatgagccagcgcgtgatgattgcgatggcaattgcttgcagacctaaattattgattgctgacgaaccaaccacggcattggacgtgactatccaagctcaaattatggaactcttacttgaattgcaaaagaaagaatgcatgtccctaattttgattactcacgatctagcacttgtggctgaagcggcagagcgaattatcgtgatgtatgctggacaaatcgttgaagaaggcaccgcaaaagatattttccgcgagccaaaacacccttacacacaagccttgttacgttcattacctgaatttgcagagggaaaatctcgcttagaatcattacaaggggtcgtccctggaaaatacgatcgcccaacaggctgtttattaaatcctcgctgcccttatgccaccgaatattgtcgccaagttgaacctcaattgcatcatatcggttcgcgtaaagtaaaatgccatactccgctgaacgagcaaggcaatccagttgaatatcaaggagcttaa

SEQ ID NO: 2488 - protein, 330 aa, Haemophilus influenzae
MALLDVKELSVHFGDKKTPFKAVDRISYQVAQGEVLGIVGESGSGKSVSSLAIMGLIDHPGRVSAESLQFENTDLLTLESKAKRQLIGADVAMIFQDPMTSLNPAYTVGFQIMEALKTHEGGTKKARKDRTLELLKLVGIPDPESRIDVYPHQLSGGMSQRVMIAMAIACRPKLLIADEPTTALDVTIQAQIMELLLELQKKECMSLILITHDLALVAEAAERIIVMYAGQIVEEGTAKDIFREPKHPYTQALLRSLPEFAEGKSRLESLQGVVPGKYDRPTGCLLNPRCPYATEYCRQVEPQLHHIGSRKVKCHTPLNEQGNPVEYQGA

SEQ ID NO: 2489 - DNA, 888 bp, Haemophilus influenzae
atgtctgacacgcctttaactttcgcgccaaaaacacccttacaagaattttggttttactttaaacaaaatcgtggtgcgctaattggtttaatttttattttgattgttgccttaatcagcattctcgcaccttatattgcaccttttgatccaacagaacaaaatcgtaccgcacttttacttccccctgcttggtatgagggcggtaatcctgcttatttactcggcacagacgatattgggcgagatattctttcgcgtattatttatggaacgcgaatttccgtctttgcgggatttgtcattgtattgctatcctgtgccttcggcaccagtcttggcttaatttctggctattatggcggcgtgctagatacaattatcattcgcctaattgatattatgctcgcgattccaaacttacttttgacgattgtagtcgtctctattttagagccatcactcgccaatgccactttagcgatcgccgtggtatcgattcctagctatgtgcgtttaactcgagcagcgatgatgaatgaaaaaaatcgtgattatgtgacttcatctaaagtggcaggggcaggtattttacgcctcatgtttattgtgattttaccaaactgtttagcccctttaattgtgcaaatgacaatgggcatttccaatgccatcttagaactcgcaacacttggtttcttaggcattggtgcaaaaccaccaacacctgaacttggcacaatgctttcagaagcacgcggttttatgcaagcggcaaactggttagttacaattcctggcttagtgattttatctttggtattagctttcaacttaatgggcgatggcttgcgtgatgcccttgatccaaaactcaaacaatag

SEQ ID NO: 2490 - protein, 295 aa, Haemophilus influenzae
MSDTPLTFAPKTPLQEFWFYFKQNRGALIGLIFILIVALISILAPYIAPFDPTEQNRTALLLPPAWYEGGNPAYLLGTDDIGRDILSRIIYGTRISVFAGFVIVLLSCAFGTSLGLISGYYGGVLDTIIIRLIDIMLAIPNLLLTIVVVSILEPSLANATLAIAVVSIPSYVRLTRAAMMNEKNRDYVTSSKVAGAGILRLMFIVILPNCLAPLIVQMTMGISNAILELATLGFLGIGAKPPTPELGTMLSEARGFMQAANWLVTIPGLVILSLVLAFNLMGDGLRDALDPKLKQ

SEQ ID NO: 2491 - DNA, 888 bp, Haemophilus influenzae
atgggggaacgcggcttaacggcagaagtacatcaacaaatgatgcaccaattgggtttagatttacctctttatcagcaatatttccactatattggcaatgtaattcaaggggatttcggtgcatcgttccgcactcaacaacctgtccttactgaattttttacgctttttcctgctaccgctgaattagctttttttgcgttattttggtcattattaggtggaataattttaggcacgattgccgcagtaaaaaaagacagttggatttctcacaccgttacagctgcatcgctcacaggttattctatgccgattttctggtggggtttaattttaattttatatgtttcgccacaactcggtttgccacaaggtgggcgtttagataatgaattttggatcgatacaccaacaggatttatgcttattgatagctggctttcaggtgtttctggtgccttcgaaaatgcggtgaaatcattaattcttcctgccatcgtcttaggcacagttcctctcgccattattacgcgtatgacacgctctgcgatgttggaagtgttaggtgaagattacattcgcacggcaaaggcaaaaggtttaagctatactcgaattgttattgttcacgcattgcgtaatgcgttaattcctgttgtcactgtggtcgggttaattgtaggtcaattgctttctggtgcagttctcacagaaactattttctcttggccggggattggaaaatggattattgatgccattcaagcccgtgattatccagtgttgcaaggttctgtactgattattgcgacgattattattgtggtgaatttaaccgtcgatttactttacggtgtggtcaatccgcgtatccgtcattaa

SEQ ID NO: 2492 - protein, 295 aa, Haemophilus influenzae
MGERGLTAEVHQQMMHQLGLDLPLYQQYFHYIGNVIQGDFGASFRTQQPVLTEFFTLFPATAELAFFALFWSLLGGIILGTIAAVKKDSWISHTVTAASLTGYSMPIFWWGLILILYVSPQLGLPQGGRLDNEFWIDTPTGFMLIDSWLSGVSGAFENAVKSLILPAIVLGTVPLAIITRMTRSAMLEVLGEDYIRTAKAKGLSYTRIVIVHALRNALIPVVTVVGLIVGQLLSGAVLTETIFSWPGIGKWIIDAIQARDYPVLQGSVLIIATIIIVVNLTVDLLYGVVNPRIRH

SEQ ID NO: 2493 - DNA, 120 bp, Haemophilus influenzae
ttgcgcatttggcaaaactggaaaaagtgcggtagaattcaagagtattatattttttaccgattaatttctttgaaaagtgcggtgaatttttaccgcacttttattatctacgagtga

SEQ ID NO: 2494 - protein, 39 aa, Haemophilus influenzae
MRIWQNWKKCGRIQEYYIFYRLISLKSAVNFYRTFIIYE

SEQ ID NO: 2495 - DNA, 117 bp, Haemophilus influenzae
atggcaataaaagtagggatcaccattaagattcgtttgaatacaaatttaaacattccatcactcgtagataataaaagtgcggtaaaaattcaccgcacttttcaaagaaattaa

SEQ ID NO: 2496 - protein, 38 aa, Haemophilus influenzae
MAIKVGITIKIRLNTNLNIPSLVDNKSAVKIHRTFQRN

SEQ ID NO: 2497 - DNA, 2184 bp, Haemophilus influenzae
atgatggatatttctgaattacttgacggactcaacgataaacaacgcgaagccgtagctgctcctcttggtaatcacttagtgttagctggtgcaggctcgggcaaaacgcgtgtattgacgcaccgtattgcttggttaattgcggtcgaaaatatttctgaaggcagcattatggcggtgacctttaccaataaagccgcagcagaaatgcgtcatcgtattcaatctacccttgccaaacacgcacaacatcaattatttggtatgtggattggcaccttccatagcattgctcatcgtttgttgcgagctcatcatttagatgtgggattgccacaagatttccaaattttagattcagaagatcaacttcgtttaattaaacgattattaaaattacataattttgatgaaaaagcttttccgcctaaacaggcttgttggtacatcaataacaaaaaagatgaaggcttgcgaccaaatgatattgaagattttaatgatcgccaagaacgtgaatggattaaaatttatcagatctatcaagacacttgcgatcgcgcagggttggtcgattttgctgaattattaattcgggtctatgaattatttgagaaaaaaccattaattttgcaacgttatcaacaacgttttcagcatattttggtggatgaatttcaagacaccaataaaatccaatataaatggatcaaaattcttgctggaaaaacaggccaagtcatgattgtgggcgatgatgatcaatctatatacggttggcgtggcgcacaaattgaaaatatccaaaaattcttgaaagatttcaaagccgagacaattctccttgaacaaaactatcgttctaccgccaatatcctaaacagcgcaaatgaattaattgcaaacaatagtgatcgtcttggtaaaaatttatggacagagggtgaaaaaggcgatcctgtgggcatctatgctgcctttaatgaattagacgaagcaaaatttgtcgcttcacaaattcaggattgggtagaaaatggcggaaaacttgatgattgcgctgtactttatcgtagtaatagccaatcacgggttattgaagaagccttaattcgttgtcaaattccatatcgtatttatggcggtatgcgtttcttcgaacgtcaagaaattaaagatgcgttagcctatcttcgtttgattaataatcgtcaagatgatgcggcttttgagcgtgtaattaatacgccaacccgtggcattggcgaccgcactttagatatattgcgtaacttaacacgtgaacgccaaattaccttatggcaagcagtacaagtcgcaacacaagaaaatatgttggcagggcgagcctcaacagccttattacgtttccaagaattaattaattcactacaacttgataccgcagaaatgccgcttttcgcacaaactgattttgtgattaaacattcgggcttatatgaaatgtatcaacaagaaaaaggcgaaaaaggcgaagtgcgtattgaaaatttggaagaattagttaccgcaacccgtgaatttatcaaacctgataatgcggaagaaatgaccgaactcactgcctttttaacgcacgcttccttagaagctggagaagaacaagcctcgccgcatcaatcttgtgtagaaatgatgacgttgcactctgcgaaaggcttagaatttcctcgtgtatttatggtgggcgtagaagaaggattattcccaagttttcgttcttttgaagaacccggacgtttagaagaagagcgtcgtttagcttatgtcggtattactcgcgcacagaaaaaactgaccatctcttatgcggaaagccgtcgattatatgccaaagaagaacgccatttgccatcacggtttatcgcagaattaccgagagaatgtatccaagaaattcgtttacgagggacagtcacgcgtgcgatgaccctagcaaaagtcggttcattgtcgaataccagtgcggtcgaaaatgaatggaaaatgggtcaaaaagttaaacacgaaaaatttggtttcggcacagtgattaatgtggaaggatctgaaaataacacacgtttacaaatagcgttccaagcgcaaggcattaaatggcttattgcgcatttggcaaaactggaaaaagtgcggtag

SEQ ID NO: 2498 - protein, 727 aa, Haemophilus influenzae
MMDISELLDGLNDKQREAVAAPLGNHLVLAGAGSGKTRVLTHRIAWLIAVENISEGSIMAVTFTNKAAAEMRHRIQSTLAKHAQHQLFGMWIGTFHSIAHRLLRAHHLDVGLPQDFQILDSEDQLRLIKRLLKLHNFDEKAFPPKQACWYINNKKDEGLRPNDIEDFNDRQEREWIKIYQIYQDTCDRAGLVDFAELLIRVYELFEKKPLILQRYQQRFQHILVDEFQDTNKIQYKWIKILAGKTGQVMIVGDDDQSIYGWRGAQIENIQKFLKDFKAETILLEQNYRSTANILNSANELIANNSDRLGKNLWTEGEKGDPVGIYAAFNELDEAKFVASQIQDWVENGGKLDDCAVLYRSNSQSRVIEEALIRCQIPYRIYGGMRFFERQEIKDALAYLRLINNRQDDAAFERVINTPTRGIGDRTLDILRNLTRERQITLWQAVQVATQENMLAGRASTALLRFQELINSLQLDTAEMPLFAQTDFVIKHSGLYEMYQQEKGEKGEVRIENLEELVTATREFIKPDNAEEMTELTAFLTHASLEAGEEQASPHQSCVEMMTLHSAKGLEFPRVFMVGVEEGLFPSFRSFEEPGRLEEERRLAYVGITRAQKKLTISYAESRRLYAKEERHLPSRFIAELPRECIQEIRLRGTVTRAMTLAKVGSLSNTSAVENEWKMGQKVKHEKFGFGTVINVEGSENNTRLQIAFQAQGIKWLIAHLAKLEKVR

SEQ ID NO: 2499 - DNA, 630 bp, Haemophilus influenzae
atggaaaaatatcatgattttgaaccgaactttaacatagtcgaaatttttgaaagtctgcaaggggagggcttcaatacgggaatgccaagtgtttttgtacgatttggtaaatgcaatctagactgtccttggtgtgatacaccttataataattttaaacgctggtctgtatcacaaattctagaaaaagtgcggtcattttcgtcaaagaatattatcatcacaggtggtgagccaacaattgtaccaaaaattgaatacttacttgagcaatttaaatcagatggctattttcttgcaattgaaaccaatggtctaaaagcaattcctgcacaaatagattatattgcgacgagtcctaagagcctttatgctcataagtatgaaaagcgttgcattccatttgcaaatgaagtacgtattgtaatggacagtaatatgccatcattttgtgaattgatcgagcaaaaaataaaagcaaagaattactatctttcaccttgtgaaattgatgggaaaatgaatttacttgagactatcactttacttggtcaattgaatcaacgttcaaataaacctaaatggcagctaagtttacaaacacataaattgattggtattgagtaa

SEQ ID NO: 2500 - protein, 209 aa, Haemophilus influenzae
MEKYHDFEPNFNIVEIFESLQGEGFNTGMPSVFVRFGKCNLDCPWCDTPYNNFKRWSVSQILEKVRSFSSKNIIITGGEPTIVPKIEYLLEQFKSDGYFLAIETNGLKAIPAQIDYIATSPKSLYAHKYEKRCIPFANEVRIVMDSNMPSFCELIEQKIKAKNYYLSPCEIDGKMNLLETITLLGQLNQRSNKPKWQLSLQTHKLIGIE

SEQ ID NO: 2501 - DNA, 426 bp, Haemophilus influenzae
atgtttaaaatttccaaagaatttagctttgacatggcacatttattagatggacatgatgggaaatgtcaaaatttacatggacacacatataaattacaagttgaaatttcgggtgacttatatgaatcaggtgcaaaaaaagcaatggtcattgatttttcagatctaaagtctattgtgaaaaaagttattttagatccgatggatcacgcctttatttatgatcaaaccaatgagcgagaaagccaaattgccactctattgcaaaagttaaactcaaaaacttttggtgttccctttagaactacggcagaagaaatagctcgttttatttttaatcgtttaaaacatgatgaacaactgtccatatcatccattcgtttatgggaaaccccaacttcattttgcgagtatcaggagtaa

SEQ ID NO: 2502 - protein, 141 aa, Haemophilus influenzae
MFKISKEFSFDMAHLLDGHDGKCQNLHGHTYKLQVEISGDLYESGAKKAMVIDFSDLKSIVKKVILDPMDHAFIYDQTNERESQIATLLQKLNSKTFGVPFRTTAEEIARFIFNRLKHDEQLSISSIRLWETPTSFCEYQE

SEQ ID NO: 2503 - DNA, 684 bp, Haemophilus influenzae
atgaatattttcaatccaaaccacgatcgtaaagcgattgtcatcttttcaggtggacaagactccacgacttgtttattccaagctattgctgaatacggcaaagaaaacatagaagccattacctttcaatatgggcagcgtcatgctattgagttagaaaaggcgcgcgccattacgcaagatctcggcattaaacaaaccttgattgatacatctgttatgaaagctatcacgcataatgcattaatggatgaacaagcgcatattgagcaaaaagagagtgaattgccaaacacttttgttgatggtcgcaatgccctatttttactttatgcagcgatttatgcgaaaggccaaggcattcaagatattatcactggcgtatgtgaaacagatttcagcggttatccagattgccgagatgtgtttatcaagtcaatgaatgtcacattaaatttagctatggattatcaattcaatatcaaaacaccattaatgtatctcactaaagcccaaacttggcaacttgctgatgaattaggcgtattagattatgtacaaaaacatactcacacttgctatgaaggcatcgaaggtggatgcggaaaatgcccaagctgtattttacgcaataaaggtctaaagaaatatttgactcaaaaaggtagaaaaaatgtttaa

SEQ ID NO: 2504 - protein, 227 aa, Haemophilus influenzae
MNIFNPNHDRKAIVIFSGGQDSTTCLFQAIAEYGKENIEAITFQYGQRHAIELEKARAITQDLGIKQTLIDTSVMKAITHNALMDEQAHIEQKESELPNTFVDGRNALFLLYAAIYAKGQGIQDIITGVCETDFSGYPDCRDVFIKSMNVTLNLAMDYQFNIKTPLMYLTKAQTWQLADELGVLDYVQKHTHTCYEGIEGGCGKCPSCILRNKGLKKYLTQKGRKNV

SEQ ID NO: 2505 - DNA, 144 bp, Haemophilus influenzae
atgaaaaaatggttgttgattatcgcaggcgcgttgattatttcagcttgcgcaaataaggatgtgtattttaacggtgcagaaggttcgcattcaggtgttaaatttgataaagattctcgccaatggggattaaatcaataa

SEQ ID NO: 2506 - protein, 47 aa, Haemophilus influenzae
MKKWLLIIAGALIISACANKDVYFNGAEGSHSGVKFDKDSRQWGLNQ

SEQ ID NO: 2507 - DNA, 393 bp, Haemophilus influenzae
atggaagtccacgataaaattcgagtaatgagagaaatcaatcaatggtcacaagaagaaatggcagaaaaactttcgatgtcgccgaatggatatgccaaaattgaacgtggacaaagcagtattaatttagataaattacagcaaattgcgaatgtgtttaatattgatatgggcgaattgattacttgtaaggatagatcaattttctttgcggtaggtggtgataattcttataacttaactaacagtcatttcggtactaatgaagtattaacagctgaaaatgaaaaattaaatagtttactgacaatgaaagataccttattagctcaaaaagatgatgaaattaaggcattaaaagagattattgaattattaaaatcaaaataa

SEQ ID NO: 2508 - protein, 130 aa, Haemophilus influenzae
MEVHDKIRVMREINQWSQEEMAEKLSMSPNGYAKIERGQSSINLDKLQQIANVFNIDMGELITCKDRSIFFAVGGDNSYNLTNSHFGTNEVLTAENEKLNSLLTMKDTLLAQKDDEIKALKEIIELLKSK

SEQ ID NO: 2509 - DNA, 738 bp, Haemophilus influenzae
atgaaaataacatttactagatcattattagcaacagccgtaatggtgggattaactgcttgtggttcaggtggtggtaatggtatgaataacaatacaactagtcaagttacaggaaaaacgggcgcaatgtatacagtttcattaactaatgataataaaatagggacggttacgaaaactccattaaataattctgatattaattctcttaatttagatagcgcatcaacacaacgtattaatgaagctatgaataaaatttcagaggaatttaaatcaaaaacaggattagatgttgttactggagctgcaattgtttctaatggagaaaagtttcatattatctataacggtaatccaacagaaacaatgccagtacaaggttcaatccattataaaggttctgccgttttagggggatggtctgcggatgctccactctcaattgaaaaaggaacctctcaatttgatgtgaattttgctgatagcaccttaactggaacattaaatgttccgaatttttctcttgtttccatatcagctagcgtgtcaggaaacagtttttctggtcgagcaacatcccctgatgctcctgatggtgctgtcgtagagggaaaattttatggaaaagatgctcttggtttatcaggaatgttaaaaacaaatacatttacagataattttggtggagcggggatctttagtgctattgatgaaacgaaaataacacaataa

SEQ ID NO: 2510 - protein, 245 aa, Haemophilus influenzae
MKITFTRSLLATAVMVGLTACGSGGGNGMNNNTTSQVTGKTGAMYTVSLTNDNKIGTVTKTPLNNSDINSLNLDSASTQRINEAMNKISEEFKSKTGLDVVTGAAIVSNGEKFHIIYNGNPTETMPVQGSIHYKGSAVLGGWSADAPLSIEKGTSQFDVNFADSTLTGTLNVPNFSLVSISASVSGNSFSGRATSPDAPDGAVVEGKFYGKDALGLSGMLKTNTFTDNFGGAGIFSAIDETKITQ

SEQ ID NO: 2511 - DNA, 1269 bp, Haemophilus influenzae
atgttatttattcagataatgaaaaatataatagtctttttatcactatgtttaattagttctaatatttatagtgaaacgagagcaattaattataattcatctgatataaaacaaaatccagcaataatagaaatgttattgctggatgccattgatgaagacaatattaatggaatagaatcattattgatagattaccagagattacataatgctagacttgatctaattgctattgccaaatttaaaattggtcaataccagtttaataattatcaaaataataaatctttaaaaaattttcaattagctaaattaatatttaattttccgccacttcatttttacatcatagaacagtacctatccgttttaaaagcaagagaaagttggcaattttccttaggtgggaattatttacaaactaagaacgtgaataatacgtctaatgagcgacatattgaaaacacaggctttgtgaaaaatgaggatatgttgccacaatcggcacatggctttgcttattattttgatgctcagaaaaattggaacatagcaggttcgcattatctgcattttgcgaataacctatatggcaaaaattattggaataatcataattatgatgaaatcactaaccgcacttatttaggctatcaatatcaaaatgctaaatataaattggtattaaaaccgttttatgagcgtcaatggttgggcggtcatcgttataactgggcaaatggtgctagagcggaatatagtttaaatctttcaaaaaattggcagatttcaaccgcacttgaattaagccagctacgttattttacccaagcagatcgtaatggaacaattaagttagcttctgtaacctttatttggcagccatctgataaaggttattattacttaggttcggattttattcgcgaaaccacgcgtataaaacaatatagcaatgatatgaaagcattacgattaggttggcggcaaaattggggttatgcaattgcaagtcaaattaatggctctattgcgttgaaacagtataaggattttgcttctcttggtgggattttgccgttaaataaaattcgtcgagataaaatctattctctgaatttaactttatggaaacaagattggcagtatttaggttttacgccgaaagtgcaattccgttggaaaaaacaagaaagtaaccttccttcaatgttttcttattcagaaaaatatgtgcagatgttagtagaaaaggatttttaa

SEQ ID NO: 2512 - protein, 422 aa, Haemophilus influenzae
MLFIQIMKNIIVFLSLCLISSNIYSETRAINYNSSDIKQNPAIIEMLLLDAIDEDNINGIESLLIDYQRLHNARLDLIAIAKFKIGQYQFNNYQNNKSLKNFQLAKLIFNFPPLHFYIIEQYLSVLKARESWQFSLGGNYLQTKNVNNTSNERHIENTGFVKNEDMLPQSAHGFAYYFDAQKNWNIAGSHYLHFANNLYGKNYWNNHNYDEITNRTYLGYQYQNAKYKLVLKPFYERQWLGGHRYNWANGARAEYSLNLSKNWQISTALELSQLRYFTQADRNGTIKLASVTFIWQPSDKGYYYLGSDFIRETTRIKQYSNDMKALRLGWRQNWGYAIASQINGSIALKQYKDFASLGGILPLNKIRRDKIYSLNLTLWKQDWQYLGFTPKVQFRWKKQESNLPSMFSYSEKYVQMLVEKDF

SEQ ID NO: 2513 - DNA, 1032 bp, Haemophilus influenzae
atgaaagacttagactggaataaccttggttttagttatattaaaacagattaccgcttcatcgctcactggaaagatggcaaatgggacgaaggaaaactcactacagatagcacattacatattcacgaaggttcaaccgctcttcactacggtcagcaatgttttgaaggattaaaggcttaccgttgcaaagatggttcaatcaacttattccgcccgcaagcaaatgcagagcgtatgcaacgtaccgcagaccgtcttttaatgccacgcgtaccaactgaattattcgtgcgtgcatgtaaagaagtggttaaagctaaccaagattggttgggtccttacggttctggtgcaaccttatacttacgtccattcttaattggcgtgggcgaaaatatcggcgtgaaaacggcaccagagtttattttctctgttttttgttgcccagtgggtgcttacttcaaaggtggtttggctccatcaaactttatcacgaccgattacgaccgtgctgcaccaatgggcactggtggtgtgaaagtgggcgggaactacgcagcaagcttacttccacacgaattagccgcagaacaaggtacgccagaacgtaaatttgcggatgcaatctatttagatccaaaaactcacaccaaaattgaagaagtcggtgcggcaaacttttttgggatcacaaaagacaataaattcatcacaccaaaatcagaatctattttaccaagtatcactaaatactctcttttacatatcgcaaaagagcgtttaggtatggaagctattgaaggcgatgtgtatatcgatcaactcgatcaattcgtagaagctggtgcgtgcggtacagcggcggtgattactccagtgggcggcattcaacacaacggaaaattccacgtattctattcagaaactgaagtaggccctgttacccgtcgtctttatgatgaattaacaggcatccaattcggtgatatcgaagcacctgaaggctggattgtgaaagtaggataa

SEQ ID NO: 2514 - protein, 343 aa, Haemophilus influenzae
MKDLDWNNLGFSYIKTDYRFIAHWKDGKWDEGKLTTDSTLHIHEGSTALHYGQQCFEGLKAYRCKDGSINLFRPQANAERMQRTADRLLMPRVPTELFVRACKEVVKANQDWLGPYGSGATLYLRPFLIGVGENIGVKTAPEFIFSVFCCPVGAYFKGGLAPSNFITTDYDRAAPMGTGGVKVGGNYAASLLPHELAAEQGTPERKFADAIYLDPKTHTKIEEVGAANFFGITKDNKFITPKSESILPSITKYSLLHIAKERLGMEAIEGDVYIDQLDQFVEAGACGTAAVITPVGGIQHNGKFHVFYSETEVGPVTRRLYDELTGIQFGDIEAPEGWIVKVG

SEQ ID NO: 2515 - DNA, 894 bp, Haemophilus influenzae
atgtataaacgtttgccaccattgaattccctaaaatcttttgagtcggctgctcgttatttaagttttactaaagcagcagatgagctttgtgttacacaggcggcggttagtcatcaaattaaattattagaagaatttttagggattgaattatttaagcgaaagaatcgttctttagaattaacggagcttggtaaagcttattttgttgatattaataaaattctgcgtcgcttaaatgaagcaacagagcgattgttgatgttaaaagcagatcctcacttaaacattagtgtgccacaaacttttggtatccaatggttagtgccacatttaagtgaatttaatcagctttatccgcaaattgaggttcgtttaacaggcgtggatcaagatgaaggtttgttaaataaagaaattgatcttgctatttattatggtttgggaaattggcagaatcttcaagtagatcgtcttggtgaagaaaatttattgattttagcctcacctgaattgctagccgaaaatccaattattcagcctgaagatttaaaaaaacacacattaattcacattcatacctgtgataattggcaaacgatggcaaatcatttacagttagatgatttaaatattcagcaaggaccgttatttagccatacatttatggcgttacaggcggctattcacgggcagggcattgtattagctaatcgcttattagccttgcaagaaattgaaaatggatcattgcaagcagtgttgccgactaatttgcctgatccaaaatcattttatgtggtcaatcatcttgatcgccttgatgaccaaaaaattcaagcattccgtcagtggattattaactcaattaaacaagaagaaaatgaataa

SEQ ID NO: 2516 - protein, 297 aa, Haemophilus influenzae
MYKRLPPLNSLKSFESAARYLSFTKAADELCVTQAAVSHQIKLLEEFLGIELFKRKNRSLELTELGKAYFVDINKILRRLNEATERLLMLKADPHLNISVPQTFGIQWLVPHLSEFNQLYPQIEVRLTGVDQDEGLLNKEIDLAIYYGLGNWQNLQVDRLGEENLLILASPELLAENPIIQPEDLKKHTLIHIHTCDNWQTMANHLQLDDLNIQQGPLFSHTFMALQAAIHGQGIVLANRLLALQEIENGSLQAVLPTNLPDPKSFYVVNHLDRLDDQKIQAFRQWIINSIKQEENE

SEQ ID NO: 2517 - DNA, 1092 bp, Haemophilus influenzae
atgaataaactcgcattatattgtcgcccaggttttgagaaagaagtcgccgcagagattaccgatcaagcaagtcatttaggtgtatttggttttgctcgagtgcaagataattcgggctacgtgatttttgaatgttatcaacctgatgaggcagatcgccttgcccgagacattccttttaatcgtttgatttttgctcgtcagatgatagttatttccgatttattggaagatttagatcccgctgatcgtattagtcccatcgtggcggcgtttgaagaattatcacaacaagttaattttgctcaatctagcgagctttttgtagaaactgcagatacaaatgaagcgaaggagctttccactttttgtcgtaaatttaccgtgcctttacgtcaggcattgaaaaaacaaggttggctttcggcaaaggcgagtcaaaagtgcggtcaatttttacattgtttttttgtaaaaccgaattgctgttatgtgggatattcttatgtggataatcattccccccattttatgggaatccctcgtttaaaatttcctgcagatgcaccgagtcgctccacgttaaaactagaagaagctattttgacttttattccgcgtaaagaagagaataaacgtttaaatgaaaatatgattggcgttgatttaggggcttgccctggtggttggacgtatcaattagtcaaacgcggtttatttgtttatgctgttgatcacggaaaaatggcggcgagtttgcatgatacggggcgcattgaacattgcgcggaagatggttttaaatttcagcctcccaaaaggaaaaaagtggattggttagtctgtgatatggtggaacaaccaagtcgtatttctttattgattggtaaatggttgttgaatggttggtgccgagaaaccatcttcaatttaaaattacccatgaaaaaacgttatcaagaagtgatattatgtttagaaaacttggctgttatgttggctgagcagaatttaaattttgagattcaagcaaaacatttatatcacgatcgtgaagaaatcacggttcatatagcattaaaaccttga

SEQ ID NO: 2518 - protein, 363 aa, Haemophilus influenzae
MNKLALYCRPGFEKEVAAEITDQASHLGVFGFARVQDNSGYVIFECYQPDEADRLARDIPFNRLIFARQMIVISDLLEDLDPADRISPIVAAFEELSQQVNFAQSSELFVETADTNEAKELSTFCRKFTVPLRQALKKQGWLSAKASQKCGQFLHCFFVKPNCCYVGYSYVDNHSPHFMGIPRLKFPADAPSRSTLKLEEAILTFIPRKEENKRLNENMIGVDLGACPGGWTYQLVKRGLFVYAVDHGKMAASLHDTGRIEHCAEDGFKFQPPKRKKVDWLVCDMVEQPSRISLLIGKWLLNGWCRETIFNLKLPMKKRYQEVILCLENLAVMLAEQNLNFEIQAKHLYHDREEITVHIALKP

SEQ ID NO: 2519 - DNA, 1170 bp, Haemophilus influenzae
atgaatttacacgaataccaagcaaaacaactatttgagcattatggattacccgtaaaaaatggggcggtctgccaatctgttgatgaagtagatttggtactggctcaacttgcaggcggtaagtgggcagcgaaatgccaagttcatgcgggtgggcgtggtaaagcgggtggcgttaaattagtgcacgatgtagaggaagcaagatcttttgcagaaaaatggctaggacaacgtttagtcacttttcaaacggataaattgggtcagccagtaaaccagatttattttgaagaaacttgcgatattgataaagaattttacttaagtgcggttgttgatcgcgcctctcaaaaagttatgtttattgcttctcctgctggtggaatgaatattgaagaagttgcgcaaaattcaccgcacttactccataaagtcgagattgatcctttatttggaggattgccttatcaaggccgtgaattggcgtttaaattagggttaagtggtacgcaaaacaaacagtttaccgatatctttatgggcttatctcgtttgtttttagaaaaagatttatctttactggaagtcaatccacttgttctcactcaacaaggcaatttggtttgtctcgacgccaaaatatctgtcgatgataacgctttatttcgccataaagatttattggcactgcaagatttaactcaaaatgatgctcgtgaagcagaagctgaaaaattccagttaaactatgtggctttagagggcgatattggttgtatggtaaacggggctgggcttgcaatgggcaccatggatattgtgaaactctatggtgggaagcctgcgaattttcttgatgtgggtggtggtgcaacgcaagagcgggttgctgaagcgttcaaaatcattttaaccgatccttccgttaaagtgattttagtgaatatttttggtggcattgttcgttgtgatttgattgctgaaggcgtgattgctgcagtaaatgaagtgggcgtgagagtgcctgtggttgtgcgattagaaggaacgaatgctgaaatcggtcgccaaattttagtgcaaagtgacgttaatattcttaccgcacagagtttacaacaagccgcagaattagccgtgaatgcagcaaaaggagaacactaa

SEQ ID NO: 2520 - protein, 389 aa, Haemophilus influenzae
MNLHEYQAKQLFEHYGLPVKNGAVCQSVDEVDLVLAQLAGGKWAAKCQVHAGGRGKAGGVKLVHDVEEARSFAEKWLGQRLVTFQTDKLGQPVNQIYFEETCDIDKEFYLSAVVDRASQKVMFIASPAGGMNIEEVAQNSPHLLHKVEIDPLFGGLPYQGRELAFKLGLSGTQNKQFTDIFMGLSRLFLEKDLSLLEVNPLVLTQQGNLVCLDAKISVDDNALFRHKDLLALQDLTQNDAREAEAEKFQLNYVALEGDIGCMVNGAGLAMGTMDIVKLYGGKPANFLDVGGGATQERVAEAFKIILTDPSVKVILVNIFGGIVRCDLIAEGVIAAVNEVGVRVPVVVRLEGTNAEIGRQILVQSDVNILTAQSLQQAAELAVNAAKGEH

SEQ ID NO: 2521 - DNA, 882 bp, Haemophilus influenzae
atggcgattttaattgataaaaataccaaagtgatttgccaaggttttactggtggacaagggacttttcattctgaacaagcattggcctacggaacgcaattagttggtggcgtatcgccaaataaaggtggaaccactcatcttggtttacctgtatttaatacagttcgtgaagctgtcgaaaatacgggggcaacagcgacagtcatttatgtgccagcatcattttgtaaagatgccataattgaagccattgatgcagggattcagttaattgtctgtattactgagggtattcctacattggatatgcttaaagtgaaacagaaattaaatgaaacgggcgtagtaatgattgggccaaattgcccaggtgtgattacgcctgatgaatgtaaaatcggcattatgcccgctcacatacataaaaaaggtaaagtggggattgtttctcgttctggaactttaacttatgaagcggtaaaacaaactacagatgaaggctttggacaatcgacttgtgtgggtatcggtggtgatcccattccgggttctagttttattgatattctcgaaagatttcaacaagatcccgaaacagaagccattgtgatgattggcgagattggcggctcggcagaggaagaagcagcaatcttcattaaagataatgtcactaaaccagtggttgcgtatattgcgggtatcactgcaccaaaaggaaaacggatggggcatgcgggagccattattagcggcggaaaaggtactgcagtagaaaaaattgcagcgttagaagccgctggtgtgacctgtgtaaaaagcctcgctgaaattggtgaagccttgagaaagctattaaaatcatctaaaaattaa

SEQ ID NO: 2522 - protein, 293 aa, Haemophilus influenzae
MAILIDKNTKVICQGFTGGQGTFHSEQALAYGTQLVGGVSPNKGGTTHLGLPVFNTVREAVENTGATATVIYVPASFCKDAIIEAIDAGIQLIVCITEGIPTLDMLKVKQKLNETGVVMIGPNCPGVITPDECKIGIMPAHIHKKGKVGIVSRSGTLTYEAVKQTTDEGFGQSTCVGIGGDPIPGSSFIDILERFQQDPETEAIVMIGEIGGSAEEEAAIFIKDNVTKPVVAYIAGITAPKGKRMGHAGAIISGGKGTAVEKIAALEAAGVTCVKSLAEIGEALRKLLKSSKN

SEQ ID NO: 2523 - DNA, 624 bp, Haemophilus influenzae
atgagccaatttttctatatccaccctgaaaatccacaagcgcgcttgattaatcaagccgtagagattttacaaaaaggcggtgtgattgtgtatccaacggattcgggatatgccttgggctgtatgatgggcgataaacacgcaatggatcgcattgtagcaattcgtaaattgcctgaaggacataattttaccttggtgtgtagcgatttgtcggaactttcaacttatgcaacggtaaataataccgcttatcgtttgattaaaaataatacgccagggcgttatacttttattcttacagcaacgaaagaattacctcgccgtttaatgacatcaaaacgtaaaaccattggtttacgcgtaccagataataaaattgctttagatttgctttcagccttaggcgagccgattttatcttgttcgttaatgttgccgaatgaagaacatactacgcaatccgatcctgaagaaattcgtgatcgtttagaacatcaagtggatttaattattcatggtggatatttagggcaagagcctacaacagtggtagatttaacggaagaatcgccagtgattttacgcgaaggaagtggaagtactgctccttttatttaa

SEQ ID NO: 2524 - protein, 207 aa, Haemophilus influenzae
MSQFFYIHPENPQARLINQAVEILQKGGVIVYPTDSGYALGCMMGDKHAMDRIVAIRKLPEGHNFTLVCSDLSELSTYATVNNTAYRLIKNNTPGRYTFILTATKELPRRLMTSKRKTIGLRVPDNKIALDLLSALGEPILSCSLMLPNEEHTTQSDPEEIRDRLEHQVDLIIHGGYLGQEPTTVVDLTEESPVILREGSGSTAPFI

SEQ ID NO: 2525 - DNA, 1074 bp, Haemophilus influenzae
atgaaacctagtcaaaaacaaactcaaagacaaccgcacttttccaaagattcagcaaagaaacgtgatttttcagctaaaaatgacagacgttcagtatctcgtactgctcgcatagaaacagcaaatacgaaaaaaagtgcggttaattctgataacaaatttttagcgaagccaaaagcgaaacctgttgtaagagcctcgaatcaaccgaaagcagagggcgaaaaattacagaaagttttagcgcgtgctgggcaaggctctcgtcgtgaaattgaaacgatgattgccgcaggcagagtgagcgtagagggtaaaattgcgactttaggcgatcgtattgacgtacattctggcgtgaaagtgcgtattgatggtcaaatcattaatcttagccacgcacaaaaagaaatttgccgtgtattaatgtattacaaacctgaaggcgaactctgtacacgtagcgacccagaagggcgtgcgaccgtgtttgatcgtttgccgcgtttaacaggctctcgttggattgcggtggggcgtttagatattaatacatcgggtttattgctttttaccactgatggcgaattagcaaatcgtttaatgcacccaagccgtgaagttgaacgtgaatattctgtgcgtgtatttggtcaagttgatgatgcgatgttagcacgtttacgtaaaggcgttcagcttgaagatggtcctgctaattttaaagaaattaaatttacaggcggtgtgggtattaaccaatggtatgacgtaaccttgatggaaggacgtaaccgtgaggttcgtcgtttgtgggaatctcaagggattcaagttagccgcttgattcgtattcgttacggaaatatcaaactgatgaaaggtttgcctcgtggtggctgggaagaaatggatcttgaaaacgtcaattatttacgtgaattggtgggattacctgctgagactgaaacgaaattagatgtaaaacaggctagtcgtcgtccaaaatctgggcaaattcgtaaagcggtaaaacgttattcggagatgaacaaacgttataaaaaataa

SEQ ID NO: 2526 - protein, 357 aa, Haemophilus influenzae
MKPSQKQTQRQPHFSKDSAKKRDFSAKNDRRSVSRTARIETANTKKSAVNSDNKFLAKPKAKPVVRASNQPKAEGEKLQKVLARAGQGSRREIETMIAAGRVSVEGKIATLGDRIDVHSGVKVRIDGQIINLSHAQKEICRVLMYYKPEGELCTRSDPEGRATVFDRLPRLTGSRWIAVGRLDINTSGLLLFTTDGELANRLMHPSREVEREYSVRVFGQVDDAMLARLRKGVQLEDGPANFKEIKFTGGVGINQWYDVTLMEGRNREVRRLWESQGIQVSRLIRIRYGNIKLMKGLPRGGWEEMDLENVNYLRELVGLPAETETKLDVKQASRRPKSGQIRKAVKRYSEMNKRYKK

SEQ ID NO: 2527 - DNA, 972 bp, Haemophilus influenzae
atgaaaatgcatcaattgcgttatatcgttgagattgtaaaccaaaatttgaatgtcacagaagcggcaaatgcactttacacatcacagccgggtatcagtaaacaagttcgcctattagaagatgaattaggtctagaaatttttgagcgtcatggcaaacatataaaatcaattacaccagcagggaaaaagattatctcaattgcacgcgagttacttgttaaagcgcaaggtatccgtgccgttgccgatgaatatactcagccaaatcacggtgtattacgtattgcgacgacaaatactcaggcacgttatatgctgccaagcgtgattgaacgtttttctaaaaaatatcctgatgtgagcttgcatattcatcaaggttcgccaacacaaattcacgatgctttaatgtcaggtgaagtggatttggcaattaccactgaagcaccttatttatttgatgatttagttcagattccatgctattggtggaatcgtgctgtgattgtttcgccagaacatccgcttgccaaagtgaaagaattgaccattgaggaattaggcaaatacccacttgtgacttacacgtttggttttacgggtgtttctgatttagattacgcatttaatagtgcaggcattttaccaaatatagtttttacggctaccgatgctgatgttattaaaacttatgtgcgcttgggtttaggggtgggcattatggcatctatggcacatacggcattagatacggatcttgtgctaattgatgcaagccatttgttccgcccgagtatgacgaatattgcatttaaacatagcacgttcttacgtaattatatgtacgatttcatggaatatttttcaccgcacttaactcgtagtgtcgtagaaaaagccgagcgtttgcgtgataacaattcagtgaaaaaattatttgaaggcattgaattggaaacaagataa

SEQ ID NO: 2528 - protein, 323 aa, Haemophilus influenzae
MKMHQLRYIVEIVNQNLNVTEAANALYTSQPGISKQVRLLEDELGLEIFERHGKHIKSITPAGKKIISIARELLVKAQGIRAVADEYTQPNHGVLRIATTNTQARYMLPSVIERFSKKYPDVSLHIHQGSPTQIHDALMSGEVDLAITTEAPYLFDDLVQIPCYWWNRAVIVSPEHPLAKVKELTIEELGKYPLVTYTFGFTGVSDLDYAFNSAGILPNIVFTATDADVIKTYVRLGLGVGIMASMAHTALDTDLVLIDASHLFRPSMTNIAFKHSTFLRNYMYDFMEYFSPHLTRSVVEKAERLRDNNSVKKLFEGIELETR

SEQ ID NO: 2529 - DNA, 945 bp, Haemophilus influenzae
atggaaacttcacataaccaagaattagttgcaactatcttggaagataatgttgcaaacgaactgcaaaccatccaagattttctgcgttggacgtatagcattctcaatcgatctgatatttacttcgggcaagggcacgataatccttgggatgaaagcctgcaactcgttttaattggcttacatttacccattgatttacctaccgaattatttaacagtcgattaaccccatctgaaaaagaaaccttagttcaacttgtattaacccgaatcgaacaacgcgtacctgtggcatatttaacgaatagtgcttggttctgcggccatgaattttatgtcgatgaacgaaccattattccacgttctccaattagtgctttaattcaagatcgatttgaagatttaatttcacaagaaccaaatcatattctcgatctatgcacaggcagcggttgtattgccattgcttgtgcttatactttcccgaatgcggaagtagatgcggtagatttatcggttgatgcacttaatgtcgcagagatcaatatttcacgccataaattagagcatcgcgtattcccgattcaatcaaacttatttgaaaatattttgggacaaaaatacgatcttatcgtgaccaatccaccttatgtggacgaagaagatctcgccgatatgccagaagaattccattttgaaccagagttagccttaggttctggcagtgatggcttaaacattaccaaacaaattttaaaacaagcatcagattacttaaccgaaaatggcgtgttagtgtgtgaagtgggtaatagtatgattagcttaattgagcaatatccagatgtaccatttgaatgggtagaacttaaaaatggcggactaggcgtatttgctattcagcgtaaagatttagtgaaatatcacgatctgttttaa

SEQ ID NO: 2530 - protein, 314 aa, Haemophilus influenzae
METSHNQELVATILEDNVANELQTIQDFLRWTYSILNRSDIYFGQGHDNPWDESLQLVLIGLHLPIDLPTELFNSRLTPSEKETLVQLVLTRIEQRVPVAYLTNSAWFCGHEFYVDERTIIPRSPISALIQDRFEDLISQEPNHILDLCTGSGCIAIACAYTFPNAEVDAVDLSVDALNVAEINISRHKLEHRVFPIQSNLFENILGQKYDLIVTNPPYVDEEDLADMPEEFHFEPELALGSGSDGLNITKQILKQASDYLTENGVLVCEVGNSMISLIEQYPDVPFEWVELKNGGLGVFAIQRKDLVKYHDLF

SEQ ID NO: 2531 - DNA, 504 bp, Haemophilus influenzae
atgcaagacgaatttgatttattccgtgcggaaaccaaaggtattaagccaattaaacaagatacttttgttgccccccgccaaaaacgtgatcagaaaaaaatagaattgaaagaattacgagcgaaagaagatacattgttctatttttctgatgaatatgagccattactgaatgagcatgatggtgttgtgaaatatttacgtgatggggaagattcccatttattaaaacaacttcgtcgtggagatttttcgccagaattgtttttagatttacacggtttaacccgtgaacaagctaagcaagaattagccgcacttttactggcttgtgaaaatgagcatgtagattgtgccagtatcatgacgggctatggcacctttacattgaaaaaacaaattccacgttggctagtacaacatcctaaagtgcgggcattacatcaagcaccaagggagtggggcggtgaagccgcaattttgattttagtcgatttgtaa

SEQ ID NO: 2532 - protein, 167 aa, Haemophilus influenzae
MQDEFDLFRAETKGIKPIKQDTFVAPRQKRDQKKIELKELRAKEDTLFYFSDEYEPLLNEHDGVVKYLRDGEDSHLLKQLRRGDFSPELFLDLHGLTREQAKQELAALLLACENEHVDCASIMTGYGTFTLKKQIPRWLVQHPKVRALHQAPREWGGEAAILILVDL

SEQ ID NO: 2533 - DNA, 2136 bp, Haemophilus influenzae
atgtctcgcacgattattcttatccctgtaagtacaggcgtgggtttaactagcattagtcttggattaatccactctctcgaacaaaaaggcacaaaagttgcttttatgaaaccagtttctcaaccaagcactggcgaagataaattggatcgcacaacttctattattcgcactagcactagccttgaaactgccgaaccttttatgttaagcgtggcagaatcattaattggtcaaaatcagtctgacgtattgttagaaaaaattgtagctaaccaccaacaattaaccaaaaataatgacatcgttgtagttgaaggcttaatacccacaagaaaacacggttacgcaaacagtatcaactatgaaattgcacaagcattagatgcggaaatcgtattagttgcagcacctgcaactgaaacgccaaccgaattaaaagatcgcgtagaagctgcagcctctctatttggtggtaaaaacaatccaaatcttttaggtgttgttgtaaacaaattcaatgcacctgttgatgaatcaggtcgtactcgtccagatcttgctgaaatttttgattcattccaacacaatcatattagcgaaacagaagtaaacaaattatttgcaggtagtgccatcaagttattagcttgtgtgccttggaatgcaaatttaatcgcgacacgagcaatcgacttagtcaaacatttaggtgcatcaatcattaatgaaggagaaatcaatcgccgtattcgtggtatcactttctgtgcaagaagtttaccaaatatggttgagcatttccgtgcaggcagcttattagtcgcttcagcagatcgtccagatgtgcttgtagcagccgctcttgcagcgtcaaatggtattgaaatcggcggtctcttattaactggcggctacaaaattgatgctcaaattaataaactttgccgtccaacttttgaaaaagcgaaattaccgatcttccgtattgaaggcaatacttggcaaactgcattaagtttacaaagttttaatctggaagtacctgttgatgataaagaacgtattgaaaatattaaacaatacattagccaacactttaatgctgactttatcaataatttagttgcagattccagccgtttacctcgcttatccccacctgcattccgtttccaattaactgaacttgctcgtgcggcgaaaaaacgtattgtgcttcctgaaggcgatgaacctcgtacaatcaaagcagccgtactttgtgcagaacgtggcattgcggaatgtgtgcttttagcagatcctgcatccgttcaacgagttgcagaagcacaaggtgttaaattaggtaaaggtattacaatcatcaatcctgctgacgttcgtgaaaactatgttgatcgtttagttgaattacgtaaagcaaaaggtatgaccgaaactgcggctcgtgagcaattagaagacactgtggtacttggcaccatgatgttagaagcaaatgaagtggatggtttagtatctggcgctgtccacacgactgcaaacaccattcgcccaccaatgcaaatcatcaaaactgcaccgggtagttcgattgtttcttctatcttctttatgctattaccagatcaagtgcttgtttatggtgactgtgcggtaaacccagatccaacagcagaacaacttgcagaaatcgcaattcaatctgcggattctgcaaaagcatttggtattgatccaaaagtcgcaatgatttcttactcaacgggtacatctggtagcggtgctgatgtagaaaaagtgaaagaagcaactcgtattgcgaaagaaaaacgccctgatttattaatcgatggcccattacaatacgatgcggcagtgatggaagatgtggctcgctctaaagcaccaaattcaccagtagcaggtaaagcaacggtatttgtattccctgacttaaatacgggtaacactacttacaaagcagtacaacgttctgcagatttagtgtctattggcccaatgcttcaaggtatgcgcaaaccagtcaatgacttatctcgtggtgccttagttgatgatattgtgtacacaattgccttaaccgcaattcaagcaacacaataa

SEQ ID NO: 2534 - protein, 711 aa, Haemophilus influenzae
MSRTIILIPVSTGVGLTSISLGLIHSLEQKGTKVAFMKPVSQPSTGEDKLDRTTSIIRTSTSLETAEPFMLSVAESLIGQNQSDVLLEKIVANHQQLTKNNDIVVVEGLIPTRKHGYANSINYEIAQALDAEIVLVAAPATETPTELKDRVEAAASLFGGKNNPNLLGVVVNKFNAPVDESGRTRPDLAEIFDSFQHNHISETEVNKLFAGSAIKLLACVPWNANLIATRAIDLVKHLGASIINEGEINRRIRGITFCARSLPNMVEHFRAGSLLVASADRPDVLVAAALAASNGIEIGGLLLTGGYKIDAQINKLCRPTFEKAKLPIFRIEGNTWQTALSLQSFNLEVPVDDKERIENIKQYISQHFNADFINNLVADSSRLPRLSPPAFRFQLTELARAAKKRIVLPEGDEPRTIKAAVLCAERGIAECVLLADPASVQRVAEAQGVKLGKGITIINPADVRENYVDRLVELRKAKGMTETAAREQLEDTVVLGTMMLEANEVDGLVSGAVHTTANTIRPPMQIIKTAPGSSIVSSIFFMLLPDQVLVYGDCAVNPDPTAEQLAEIAIQSADSAKAFGIDPKVAMISYSTGTSGSGADVEKVKEATRIAKEKRPDLLIDGPLQYDAAVMEDVARSKAPNSPVAGKATVFVFPDLNTGNTTYKAVQRSADLVSIGPMLQGMRKPVNDLSRGALVDDIVYTIALTAIQATQ

SEQ ID NO: 2535 - DNA, 1326 bp, Haemophilus influenzae
ttgtattttttccttaccgatgaatttattttattcatcaaaaggtgtattctatgtctgatttttcaaaccatcttagatgatggatttctattaacctcaatcaaatatagggttcctatgtcaaaacttgttcttatccttaactgtggtagttcttcactcaaatttgcaattcttgatccagcaacaggggaagaaaaattatctggcttagccgaagcatttttcttaccagaagcacgtatcaaatggaaactcaatggagagaaaggtaacgcagatttaggcgcaggtgcagcgcatactgaagcacttaattttatcgcatctaacattctgaatgatgagcttaaaaattctatcgcggcaattggtcatcgtatcgttcacggtggcgaaaaatacactcaatctgtcatcgtaacagatgaagttgttaaaggaattgaagatgctgcacaatttgcgccacttcacaaccctgctcacttaattggtattcgcgaagcattcaaggcattcccacacttaaaagataaaaacgtggtagtttttgatacagcattccaccaaactatgcctgaagaagccttcctttatgcccttccatactctttatataaagagcacggcgtacgtcgctatggtgcacacggcacaagtcactacttcgtttctcgtgaagtcgctgaatatgtaggcaaacctgcagatcaagtaaatgctattatttgtcacttaggtaatggtggttctgtttctgttgtgcgtaacggtcaatgtattgatacttcaatgggcttaactccgctagaaggtttagtaatgggtacgcgttgtggcgatattgaccccgcaatcgtattctacctatacaaaacactaggtatgtctatggatcaaatcgaagagactttagtgaaaaaatcgggtcttttaggtttaactgaagtaacaagcgactgccgttatgctgaagataactacgatgatgaatctaaaccagaaacaaaacgcgctttaaatgtttatagctatcgtttagcgaaatacattggtgcttatatggctgtgttgagcgatgatcacttagatgcaattgcattcactggtggtattggcgaaaactcagcgcacgttcgtgaattagccttaaatcacttaaaattattcggcattaaaatcgataacgaacgaaatcttgccacacgttttggtaaagatggtgtaatcaccactgatgattccgcatttaaagcaattgttcttccaactaacgaagaattggttatcgcacaagataccgcaaaactttgtttctaa

SEQ ID NO: 2536 - protein, 441 aa, Haemophilus influenzae
MYFFLTDEFILFIKRCILCLIFQTILDDGFLLTSIKYRVPMSKLVLILNCGSSSLKFAILDPATGEEKLSGLAEAFFLPEARIKWKLNGEKGNADLGAGAAHTEALNFIASNILNDELKNSIAAIGHRIVHGGEKYTQSVIVTDEVVKGIEDAAQFAPLHNPAHLIGIREAFKAFPHLKDKNVVVFDTAFHQTMPEEAFLYALPYSLYKEHGVRRYGAHGTSHYFVSREVAEYVGKPADQVNAIICHLGNGGSVSVVRNGQCIDTSMGLTPLEGLVMGTRCGDIDPAIVFYLYKTLGMSMDQIEETLVKKSGLLGLTEVTSDCRYAEDNYDDESKPETKRALNVYSYRLAKYIGAYMAVLSDDHLDAIAFTGGIGENSAHVRELALNHLKLFGIKIDNERNLATRFGKDGVITTDDSAFKAIVLPTNEELVIAQDTAKLCF

SEQ ID NO: 2537 - DNA, 108 bp, Haemophilus influenzae
atggaaaaaaatgccataaaaacacctcaaaaattgaccgcacttatcatacgctattttaagtctatttttagtaaaaatagtttaatttttcaaaaaatacgataa

SEQ ID NO: 2538 - protein, 35 aa, Haemophilus influenzae
MEKNAIKTPQKLTALIIRYFKSIFSKNSLIFQKIR

SEQ ID NO: 2539 - DNA, 444 bp, Haemophilus influenzae
atggcatttttttccattttaaaacagggacaaatttatcttaatacttggccgctggaggcgaagttaggcattattttccctgaaaaccgtattatgaaagccacgagttttgcacaaaaatttatgccttttgttgctgtgtttgcaattttgtggcagcagttttatgcaaaaaatgatttgatggcattttctatcgcaattttgaccgcactttttgccttgcttattccttttcaaggtctttattggcttggtaagcgtgccaatacgccgttagaaaatcaaagtgcggtatggttttacgatatttgcgaacgcttaaaacaactacatgaacccttgccttttgtgcaagaaaaaccgacataccaacatttagcagaagtcttaaagaaagctcaaagtaaatttgaacgtgctttttggcaggaaatttag

SEQ ID NO: 2540 - protein, 147 aa, Haemophilus influenzae
MAFFSILKQGQIYLNTWPLEAKLGIIFPENRIMKATSFAQKFMPFVAVFAILWQQFYAKNDLMAFSIAILTALFALLIPFQGLYWLGKRANTPLENQSAVWFYDICERLKQLHEPLPFVQEKPTYQHLAEVLKKAQSKFERAFWQEI

SEQ ID NO: 2541 - DNA, 492 bp, Haemophilus influenzae
atgatcgattacattattattggcattatcgctttttccattcttgttagtttattacgcggttttgttcgcgaagtgctttcactcggtagctgggttgtggcatttattgtagcaagtcagttctatccttatcttgctgcttatcttacgcaaattgaatcaatgtatattcgtaatggaactgcaatcgccattttgtttgttctgactttaattgtgggtgccatagtaaattatgtgattagtcaattagtggataagacgggtttaagcggaactgatcgcgtattaggtgcagctttcggtttagtgcgtggtgcgctgattgtggctgcgttgttattttttatggatacttttaccaattttgaacaaactgattggtggaaagaatctcaattaataccgcactttggttttattattgaatggttctttcaacaacttcaggcgagttcaagttttttaactccaacgcttaatcaataa

SEQ ID NO: 2542 - protein, 163 aa, Haemophilus influenzae
MIDYIIIGIIAFSILVSLLRGFVREVLSLGSWVVAFIVASQFYPYLAAYLTQIESMYIRNGTAIAILFVLTLIVGAIVNYVISQLVDKTGLSGTDRVLGAAFGLVRGALIVAALLFFMDTFTNFEQTDWWKESQLIPHFGFIIEWFFQQLQASSSFLTPTLNQ

SEQ ID NO: 2543 - DNA, 1518 bp, Haemophilus influenzae
atgtgtggtattgtcggtattgttagccaaagtccggttaatgaatctatttatgcagcattaacccttttgcaacatcgtggacaagatgcggcaggtattgtaacggttgatgatgaaaaccgttttcgcttacgtaaagctaatggtttagtcagtgatgtgttccatcaagaacatatgctacgcttgcaaggaaatgctggattggggcatgttcgctatcctacagcggggagttctagcgtctcagaggcacagcctttttatgtgaattctccctatggtgtcactttggtgcataacggcaacttaaccaactcagtggagttaaaagaaaaggtctttaaaacagctcgccgccatgtaaacacgaattcagattccgaacttcttcttaatattctcgctaaccatctcgatcacattcctcaagatcagctcgatccacaagatattttctatgccgttcgtaaaactcataaggatgttcgtggtgcttatgcttgtttagcgatgattattgggcatggcatggttgcgtttcgtgatccttttggcattcgtcctttggtgttgggtaaacgcgaagaaaatggcaaaactgattatatgtttgcctctgaaacagtggctttagatattgtaggttttgactttgttcgcgatattgccccaggtgaagccgtttatgtgacatttaatggcgagctttattcgcagcaatgcgccgaaagtgcggtgctaaatccttgtatttttgagtatgtttattttgcacgtccagattcaacgattgatggcgtctcggtttatgctgcgcgtgttcacatgggcgaaaaactcgggcaaaaaattgcaaaagaatgggcggatgaaattgataatattgatgtggtcattcctattcctgaaacttcaacagatattgcgttacaaatagctcgtgttctagggaagccttatcgccaaggatttgtgaaaaatcgctatgttggccgtacctttattatgccaggacaagcacagcgtattagttctgttcgtcgcaaattgaataccattaaagctgaatttaaagataaaaacgtgttattggtggacgattctattgttcgaggtacaacctctgagcaaattgttgaaatggctcgctcagctggtgcgaagaaaatttacttcgcctctgctgccccagaaattcgttatccgaatgtatatggtattgatatgccgagtcgtgatgaactgatcgcttatggacgaaatgttgaggaaattgcacatttgatcggcgtagacaaattaattttccaagatctgaccgcacttactgaatctgttcaattggaaaatccagccattcaaggttttgattgttctgttttcacaggcgaatatattacaggcgatattagccctgaatatcttaataaaatcgcaactcaacgcaatgatagtgcaaagaaaaaacgagaaaaacaagcatccaatcttgaaatttacaatgaacaataa

SEQ ID NO: 2544 - protein, 505 aa, Haemophilus influenzae
MCGIVGIVSQSPVNESIYAALTLLQHRGQDAAGIVTVDDENRFRLRKANGLVSDVFHQEHMLRLQGNAGLGHVRYPTAGSSSVSEAQPFYVNSPYGVTLVHNGNLTNSVELKEKVFKTARRHVNTNSDSELLLNILANHLDHIPQDQLDPQDIFYAVRKTHKDVRGAYACLAMIIGHGMVAFRDPFGIRPLVLGKREENGKTDYMFASETVALDIVGFDFVRDIAPGEAVYVTFNGELYSQQCAESAVLNPCIFEYVYFARPDSTIDGVSVYAARVHMGEKLGQKIAKEWADEIDNIDVVIPIPETSTDIALQIARVLGKPYRQGFVKNRYVGRTFIMPGQAQRISSVRRKLNTIKAEFKDKNVLLVDDSIVRGTTSEQIVEMARSAGAKKIYFASAAPEIRYPNVYGIDMPSRDELIAYGRNVEEIAHLIGVDKLIFQDLTALTESVQLENPAIQGFDCSVFTGEYITGDISPEYLNKIATQRNDSAKKKREKQASNLEIYNEQ

SEQ ID NO: 2545 - DNA, 891 bp, Haemophilus influenzae
atgaatattctattaacgggaggaacaggacttatcggcaaagcacttgtcgaacaactctgtttacgcaatgaacaagtgacgatcttaacgcgctcaagtttgccgcacactctctcaaagcacaaaaacatcaaatttattaccgcactttcccaacttaattcacaagaacagtttgatgccatcatcaatcttgctggcgagccaatttttcataaagtttggtcgaaaaaccagaaatctattttacgagaaagtcgtttaagcctcactactcaactgattgaattcatcaatcagtatcagcaataccctatttttatatcaggttcagcaacaggaatttacggcgatcaagacgaacaaaaaattaccgaaacaagcaaaactgcaaaaaccttcaccgcacaattatgccaagattgggaaaatatcgcgcgacaagctaatgcgagagtttgtttgattagaacaggtatggtattttctacaaaaggtggcgcacttgctaaaatgttgcctttatacaaatggggacttggcggtaaactgggcaagggagagcaatatttcccttggattgctttggaagatatggtaaacggcattttatttttactcgatcattcagaatgcagaggagcgtttaacttcgctgcccccaagtctataaaacagcataaatttaaccgcactttagctcaactattaaaacgtcctgcttttgcaaccattccaaaatggctattacatttcattcttggcgagcgagcaaatctattactcgaaagtcaaaatgttgtacctgaaaaattactcaaagcaggattccaatttcaatatgctgattgcgaaaactatctaaaagacatcctaaaaaacaaataa

SEQ ID NO: 2546 - protein, 296 aa, Haemophilus influenzae
MNILLTGGTGLIGKALVEQLCLRNEQVTILTRSSLPHTLSKHKNIKFITALSQLNSQEQFDAIINLAGEPIFHKVWSKNQKSILRESRLSLTTQLIEFINQYQQYPIFISGSATGIYGDQDEQKITETSKTAKTFTAQLCQDWENIARQANARVCLIRTGMVFSTKGGALAKMLPLYKWGLGGKLGKGEQYFPWIALEDMVNGILFLLDHSECRGAFNFAAPKSIKQHKFNRTLAQLLKRPAFATIPKWLLHFILGERANLLLESQNVVPEKLLKAGFQFQYADCENYLKDILKNK

SEQ ID NO: 2547 - DNA, 456 bp, Haemophilus influenzae
atgactgagaatttaactcgcgcttttaaagaattactcaaccaagaacgctttggttctcaaagtgaaattgtcgatgccttaaaaaaacaaggctttactggtattaatcaatcaaaaatatcaagaatgctcagcaaatttggcgcggttcgcacccgtaataccaaaatggaaatggtctattgcttaccaaatgaattaagtgttcccaataccagtagtccattaaaaaatcttgtcttagatgttgatcacaatgcgatgttaatcataataaaaacgacgcccggtgctgctcaattaattgcacgattacttgattccattggaaaatcagaaggcattttaggtactatcgcaggcgatgatactatttttgtcacgcctacaaacgataaacctatcgacgaattattgcaaaatatccaacgtttatttgaaaacgcattgtaa

SEQ ID NO: 2548 - protein, 151 aa, Haemophilus influenzae
MTENLTRAFKELLNQERFGSQSEIVDALKKQGFTGINQSKISRMLSKFGAVRTRNTKMEMVYCLPNELSVPNTSSPLKNLVLDVDHNAMLIIIKTTPGAAQLIARLLDSIGKSEGILGTIAGDDTIFVTPTNDKPIDELLQNIQRLFENAL

SEQ ID NO: 2549 - DNA, 828 bp, Haemophilus influenzae
  misc_feature 4, 5, 6, 7, 8: n is any nucleotide
atgnnnnncccaggtgttgcagtggatgtgagccatattccaactgcagtgaatgtaaaaggtttttctggtgaagatccaactccagcacttgaaggtgcggatgttgtattaatttctgctggtgttgctcgtaaacctggtatggatcgttcagatttattcaatattaatgcaggtatcgtgcgtggtttaattgaaaaagtcgcggttacttgcccgaaagcctgtgttggtatcatcactaacccagtaaatactactgttgcgattgcggctgaagtgttgaaaaaagcaggtgtttacgacaaacgtaaattatttggcgtgacaactttagatgtgttgcgttctgaaacctttgtggctgaattaaaaggtttaaatgtttctcgtacgagcgttcctgttattggtggtcactcaggtgtgactattcttccattactttctcaagttcaatatgcaaaatggaatgaagatgaaatcgaaccattaacaaaacgtatccaaaatgcaggtacagaagtggtcaatgcaaaagcgggtggcggttctgcaaccctttcaatggcgcaagctgcagcacgttttgcgcgttctttagtgaaaggattaagtggcgagacagtggttgaatgtacttatgttgaaggtgatggcaaatatgctcgtttcttctctcagccagttcgtttaggtaaagaaggtgtagaagaaattttaccaattggcccattaagcaattttgaacaacaagctctagaaaatatgttgccgactttacgtgcagatattgaattaggtgaaaaatttattaatggttaa

SEQ ID NO: 2550 - protein, 275 aa, Haemophilus influenzae
  VARIANT 2, 3: Xaa is any amino acid
MXXPGVAVDVSHIPTAVNVKGFSGEDPTPALEGADVVLISAGVARKPGMDRSDLFNINAGIVRGLIEKVAVTCPKACVGIITNPVNTTVAIAAEVLKKAGVYDKRKLFGVTTLDVLRSETFVAELKGLNVSRTSVPVIGGHSGVTILPLLSQVQYAKWNEDEIEPLTKRIQNAGTEVVNAKAGGGSATLSMAQAAARFARSLVKGLSGETVVECTYVEGDGKYARFFSQPVRLGKEGVEEILPIGPLSNFEQQALENMLPTLRADIELGEKFING

SEQ ID NO: 2551 - DNA, 531 bp, Haemophilus influenzae
  misc_feature 4, 5, 6, 7, 8: n is any nucleotide
atgnnnnncattaaatatggtgcagacaaaggtatcgtaaaagaagatttatatgactttgatcgtgcaaaagctacggcagaacgcttaggtattgaagtacaaaaatcttggggcttaggcagcattgtcaatgcaatctttgaagaagtggctgaacatcacttaattcaaccaaccttcttaatggctcatcctgcggaaatttcgccacttgcacgtcgtaatgatgaaaatcctgatgtaacagatcgttttgaactctttatcggtggccgtgaaatcggtaatggtttctcagaattaaatgatgcagaagatcaaaatgaacgttttgatgcacaagtgactgcgaaagaagcgggcgatgatgaagcgatgtttaaagacgaagactttgttgttgcactagaacacggcttaccaccaacagcaggtgaaggtttaggtatcgaccgtctagcaatgctttatgcaaatgcaccgtcaattcgtgatgttatcttattcccagcaatgcgtcagaaataa

SEQ ID NO: 2552 - protein, 176 aa, Haemophilus influenzae
  VARIANT 2, 3: Xaa is any amino acid
MXXIKYGADKGIVKEDLYDFDRAKATAERLGIEVQKSWGLGSIVNAIFEEVAEHHLIQPTFLMAHPAEISPLARRNDENPDVTDRFELFIGGREIGNGFSELNDAEDQNERFDAQVTAKEAGDDEAMFKDEDFVVALEHGLPPTAGEGLGIDRLAMLYANAPSIRDVILFPAMRQK

SEQ ID NO: 2553 - DNA, 705 bp, Haemophilus influenzae
  misc_feature 683, 684, 685, 686, 687: n is any nucleotide
atgtcagaacaagaagttaaagaattagatctcaatggcgaaatgctcgttcgtcgtgaaaaattagccgcattacgtacaaaaggtaatgcatttccaaacaagtttcgtcgtgatgctctcgcacaagatttgcacaatcaatatgatgcagaagacggtgaaatcttaaaagaaaaaggcattgaagtacaagttgctggtcgtattatgactcgtcgtgcaatgggtaaagcgacgtttatcactattcaagatatgagcggtaaaatccagctttacgttgcacgcgataatttgcctgaaggtgtttatgctgaagatgtaggtaactgggatttaggcgatatcattggagtgaaaggtacacttttcaaaactaaaaccaatgaattaaccatcaaaacaactgaagttcaacttttaaccaaagcacttcgtccattaccagacaaattccatggtttaaccgaccaagaagttcgctatcgccaacgttatttagatttaatttctaacgaagaatctcgccgcacttttattattcgttctaaagttgtcgcgggtattcgtgaatatttcatttctaaaggctttatggaagtggaaacgccaatgttacaagtgattccaggcggtgcatctgcacgtcctttcgtgacccatcacaatgcattagatgnnnnncattcattcattaattaa

SEQ ID NO: 2554 - protein, 234 aa, Haemophilus influenzae
  VARIANT 228, 229: Xaa is any amino acid
MSEQEVKELDLNGEMLVRREKLAALRTKGNAFPNKFRRDALAQDLHNQYDAEDGEILKEKGIEVQVAGRIMTRRAMGKATFITIQDMSGKIQLYVARDNLPEGVYAEDVGNWDLGDIIGVKGTLFKTKTNELTIKTTEVQLLTKALRPLPDKFHGLTDQEVRYRQRYLDLISNEESRRTFIIRSKVVAGIREYFISKGFMEVETPMLQVIPGGASARPFVTHHNALDXXHSFIN

SEQ ID NO: 2555 - DNA, 747 bp, Haemophilus influenzae
atgtttagtggcgaacatgatgcttgcgattgctatgtggacttacaagcaggctctggcggtacggaagctcaagattggacagaaatgttgctgcgtatgtatctccgttgggctgaaagcaagggttttaaaacagaactgatggaagtctctgacggcgatgtagctggattgaaatcagcaaccattaaagtgagcggtgaatatgcttttggttggttacgaacagaaacggggattcatcgtttagtgcgtaaaagtccatttgattccaataaccgtcgtcacacatcattcagtgcagcatttgtctaccctgaaattgatgacgatattgatattgaaatcaatcctgctgatttacgtattgatgtttatcgtgcatcaggggcaggtggtcagcacgtaaacaaaactgaaagtgcggtgcgaattacccatatgccaagtggcattgtggtgcaatgtcaaaacgaccgttcacagcacaagaacaaagatcaagcgatgaagcaattaaaagcgaaattgtatgagcttgaattacagaaaaaaaatgcagataagcaagcaatggaagataataaatctgacattggttggggaagccaaattcgctcttatgtattagacgattcacgcattaaagatttgcgtactggcgtggaaaaccgtaatacgcaagccgtattagacggtgatttagatcgatttattgaagcgagtttaaaagctgggctttaa

SEQ ID NO: 2556 - protein, 248 aa, Haemophilus influenzae
MFSGEHDACDCYVDLQAGSGGTEAQDWTEMLLRMYLRWAESKGFKTELMEVSDGDVAGLKSATIKVSGEYAFGWLRTETGIHRLVRKSPFDSNNRRHTSFSAAFVYPEIDDDIDIEINPADLRIDVYRASGAGGQHVNKTESAVRITHMPSGIVVQCQNDRSQHKNKDQAMKQLKAKLYELELQKKNADKQAMEDNKSDIGWGSQIRSYVLDDSRIKDLRTGVENRNTQAVLDGDLDRFIEASLKAGL

SEQ ID NO: 2557 - DNA, 225 bp, Haemophilus influenzae
atgaagaaaatttttaccgcacttttgtgcgtggctgcggctaatgcaatggcagatgatgcggcaattaaacgcaaattacagtcttttaatatatcaaatattgttattaaatcttcgccgatttcaggcattaaaacggctgttacggatcaaggtatactctatgtgagcgaagatggaaaatatctttttgaaggtaaactttatgaactcacaaaataa

SEQ ID NO: 2558 - protein, 74 aa, Haemophilus influenzae
MKKIFTALLCVAAANAMADDAAIKRKLQSFNISNIVIKSSPISGIKTAVTDQGILYVSEDGKYLFEGKLYELTK

SEQ ID NO: 2559 - DNA, 1599 bp, Haemophilus influenzae
atgctcaatccaaatcaattatatggcattgatcaagcggtaaatttattagtggaagcttatcaacaacagcaaaaaatagtgattgttggggattttgatgtagatggtgcaactagcacagcattgagtgtgctggctttaagacaacttggtttttccgatgtggattatcttgtaccaaatcgatttgaacagggttatggcttgagtattcctgtggctgaaatggcgattgaaaagggtgttcagttattaatgacggtagataacggtgtttcatcttttgaaggcattgcatttttgaaagaaaaaggcattcgagttttagtcacggatcatcatttaccgcccgaaactttgccgccagccgatgccattgttaatcctaatttaagtcagtgtcatttcccttcaaaatccttagcaggcgttggtgtggcattttatttgatgctggcggtgcgcgcaaaatttcgtgaactcggtatttttactgcagaaacacaacctaattttactgacttgctcgatctagtggcactaggcaccatcgcagatgttgtgcctttagatcaaaataatcgtatccttgcttatcaaggtttaatgcggattcgtgcacggcgttgccgtcctggtattattgcgttggcagaagtggctaaccgtaatgttgaacaatttacctcaagtgatctcggtttttgtatcgggcctcgtttaaatgcggcagggcgtttagataatatgtcgattggggtggagcttttgctggcgaacgaaatgtcaaaagccagagaattagctttagatcttgacgaactcaaccaaacacgtaaagaaattgaagcaggtatgaagcttgaggcaataaaaatttgtcaaaatcttaccgcactttttaaagagttaccctatggtattacgctttatcagcccgattggcatcaaggcgtattaggcattgtttcatcaagggttaaggatcaatatcatcgtccagtgattgcctttacgcaagatagtgagggaattttgaaaggttctgctcgttctattgaggggttacatatgcgcgatgttttagaacgtattcattcgcaacatcctaatataattttaaaatttggcggacacgcaatggctgctgggttgagtattcgagaagaatattttgccgatttccaacatctttttaatcaaaccattgccgattggcttgatgaagaacatctgcaaggcataatttggacagatggcgaactgaattcaaatgaatttaatcttgaaacggcagagttgataaaatcggtaggcacttggggacaagggtttcctgagccttgttttgatggcgaatttaaaattttagaccagcgcgcgattgggcaaaataaaaatcatctaaaaatgttgctagaaccgaaacaaggtggggggttattagatgcgattgcgtttaatattgatacaagattgtatcctgatctttcaattaaacaggctcgtttagcctataaattagagattaacgaatttcgtggcaatcgtagcgtacaattattggtagattatattgagcctatagatgagtga

SEQ ID NO: 2560 - protein, 532 aa, Haemophilus influenzae
MLNPNQLYGIDQAVNLLVEAYQQQQKIVIVGDFDVDGATSTALSVLALRQLGFSDVDYLVPNRFEQGYGLSIPVAEMAIEKGVQLLMTVDNGVSSFEGIAFLKEKGIRVLVTDHHLPPETLPPADAIVNPNLSQCHFPSKSLAGVGVAFYLMLAVRAKFRELGIFTAETQPNFTDLLDLVALGTIADVVPLDQNNRILAYQGLMRIRARRCRPGIIALAEVANRNVEQFTSSDLGFCIGPRLNAAGRLDNMSIGVELLLANEMSKARELALDLDELNQTRKEIEAGMKLEAIKICQNLTALFKELPYGITLYQPDWHQGVLGIVSSRVKDQYHRPVIAFTQDSEGILKGSARSIEGLHMRDVLERIHSQHPNIILKFGGHAMAAGLSIREEYFADFQHLFNQTIADWLDEEHLQGIIWTDGELNSNEFNLETAELIKSVGTWGQGFPEPCFDGEFKILDQRAIGQNKNHLKMLLEPKQGGGLLDAIAFNIDTRLYPDLSIKQARLAYKLEINEFRGNRSVQLLVDYIEPIDE

SEQ ID NO: 2561 - DNA, 696 bp, Haemophilus influenzae
atgaaattaaaagggctgttggcattttgtttgctttttttatcgtcgtttgttttagcagaagtcaatcagaaagaattttcagtacaaaattctccgcacttgccatcacgggacacaatttattttgaagatggacgcgattatttttcttatcaagaacctattgaacaagcgtctcgagccgataaaaaaatacggattcaattcttttttgattatgattgtcgagtatgttcttcagcgcaggatattttagaactttatagccaaatacgcacacataaagttgtgttggaacaatatcctattgcaactgccgatagccagtttagcgcacgcattttttatactttgcaagcattaagtgcgggcgaattatctaatgttttattatttgaaacttcagaaaaatcccgttatacagaattgtctacatcaaataaaattcagcaatgggcagaagaacaagggttagataagccgttatttattcaaactgaaaattcacaaagcgtaaaagaacaaattcaaaatgcgattgaattgacggaagaatatggtgtttttacctatccttacgttgtcattggtggaaaatatgtactcactgcaagtacactttataatgatgattatagcgtagcagtgttagattttttggtaaataaaatagaacaggaacaaaaacaatga

SEQ ID NO: 2562 - protein, 231 aa, Haemophilus influenzae
MKLKGLLAFCLLFLSSFVLAEVNQKEFSVQNSPHLPSRDTIYFEDGRDYFSYQEPIEQASRADKKIRIQFFFDYDCRVCSSAQDILELYSQIRTHKVVLEQYPIATADSQFSARIFYTLQALSAGELSNVLLFETSEKSRYTELSTSNKIQQWAEEQGLDKPLFIQTENSQSVKEQIQNAIELTEEYGVFTYPYVVIGGKYVLTASTLYNDDYSVAVLDFLVNKIEQEQKQ

SEQ ID NO: 2563 - DNA, 690 bp, Haemophilus influenzae
atgaaaataggaattgttggtgcaatggcacaagaagtcgaaattttaaaaaatttaatggctgatagaacggaaactcgagtagcaagtgcggtcatttttgaaggcaaaattaacggtaaaaatgttgcattattacaatcaggcattggcaaagtggcagctgccattggcacgacggcattattgcaattagccaagccagattttgtgatcaatactggctctgcaggtggggtagcaaaaggcttaaaagtgggggatattgtgatttctgatgaaacacgctatcacgatgcggatgtgaccgcttttggctatgaaaaagggcaattgcctgctaatcctgcggcatttttatcggacaaaaaattagcagatctcgctcaagaaattgcagaaaagcaagggcaatcagtaaaacgtggtttaatttgctctggcgatagttttattaatagtgaagacaaaattgcacaaataaaagcagacttcccgaatgtgacgggggttgaaatggaagccacagcgattgcacaagtttgctatgcgtttaatgtgccttttgtggtggttcgagcaatttctgatggcggcgatggtgaagctagtatgtcttttgaagagtttttaccattagcggcgaagcagtcttcggcgttagtgttggggatgattgacagactgtag

SEQ ID NO: 2564 - protein, 229 aa, Haemophilus influenzae
MKIGIVGAMAQEVEILKNLMADRTETRVASAVIFEGKINGKNVALLQSGIGKVAAAIGTTALLQLAKPDFVINTGSAGGVAKGLKVGDIVISDETRYHDADVTAFGYEKGQLPANPAAFLSDKKLADLAQEIAEKQGQSVKRGLICSGDSFINSEDKIAQIKADFPNVTGVEMEATAIAQVCYAFNVPFVVVRAISDGGDGEASMSFEEFLPLAAKQSSALVLGMIDRL

SEQ ID NO: 2565 - DNA, 2835 bp, Haemophilus influenzae
atgaagaaagctataaaattaaatttaattacacttagcctaattaatacgatcggtataacgattacacaagctcaagccgaagaaacattagggcaaattgatgtcgtagaaaaagtgatatcaaatgacaaaaaacctttcactgaagccaaagccaaaagtacgcgtgaaaatgtctttaaggaaacacaaaccattgaccaagtgattcggagcattcctggggcatttactcagcaagataaaggctcgggtgtggtttctgtaaatattcgtggcgaaaatggattaggtcgtgtcaatacgatggttgatggtgtaacacagactttttattctacagccttagactctggtcaatcaggcggaagttctcaatttggtgcggcaatcgatcctaattttattgcaggtgtagatgttaataaaagtaacttttcgggagcaagcggtataaatgcgttagcaggcagtgctaattttagaacattaagcgttaatgatgtgattaccgatgacaaaccattcggcattattctgaaaggaatgacagggagcaatgccactaaatccaattttatgacgacagctgctggcagaaaatggcttgataatggtggctatgtaggcgtggtgtatggttatagccaacgtgaagtttcacaagattatcgtattggtggcggagaacgattagcatcattagggcaagatattcttgctaaagaaaaagaagcctatttccgtaatgcaggttatgttttaaatgctgctggacagtggattcctgatttatctaaagcccattggtcttgtaacttagatatgcctcaatattcaggaagtcaagatcctattgtcacagcaaataaatatacgggagcaagagaggaacgctacactgatgcgaattgtaatgtatacataaaacaagatggtgactcaaaattctacaactatagaaatgtttacgaaaatgaagaaagaaagaaaattttagaacaatttgttaaagagaaaaaagatccatcagaaattacagaattacaaaaaggtgctgatggaattgaagaaaccaacagatcatttgaagataataaagatcaatatagtgttgcaccaattgagcctggtagtttgcaatctcgttcacgtagccatttattaaaatttgaatatggcgatgatcaccatacgctaggggcacaaatacgtacccttgataataaaattggttctcgcaaaattgaaaaccgtaattaccaagtcaattataacttcaataataacagctatcttgatcttaatttaatggctgcacataacattggcaaaactatttatcctaaaggcggtttttttgctggctggcaagtggcagataaacttatcgcaaaaaatgtggcaaatattgttgatattaacaacagccatactttcttgttgccaaaagaaattgatttaaaaaccacattaggttttaactattttaccaatgaatacagtaaaaaccgttttccagaagaattaagtttgttttatgtgaatgaatcacacgatcaaggcttatattcactcagtaataaagggcgatattctggctcacaaggtttattaccacaacgttcagtaattttacaaccttctggcaagcaaaaatttaaaacagtgtattttgataccgcactttctaaaggtatttatcatttaaattacagcgtgaattttacccattatgcctttaatggtgagtatgttggatatgacaatataacacttaaggaaccgattttgcataaatcaggtcataaaaaggcattcaatcattccgccacattaagtgcagagctaagtgattactttatgccatttttcacttattcacgtactcacagaatgccgaatattcaagagatgtttttctctcaagtgtctaatgcaggagtaaacacggcattaaaacctgaacaatctgacacctatcaactaggctttaatacttataaaaaaggtctattcactcaagacgatgtattaggcgtaaaattagtaggttatcgtagctttattaaaaactatatccataatgtttacggtgtttggtggagaaatggtaaggtacctgattgggcagccacgaatggttttcgctttaatatcgcacatcaaaattatcaacctatcgtgaaaaaaagcggggcggagttagagttaaattatgatatggggcgtttttttgcgaatgtctcttacgcttatcaacgtactaatcagccaaccaattatgccgatgccagcccacgtccgaataatgcttcaaaagaagatattttgaaacaaggttatggcttatctcgtgtttcaatgctaccaaaagactacggtagattagagcttggtacacgttggtttgataaaaaattaaccttaggtatggcagctcgttattatggaaaaagtaaacgtgcgacaattgaagaagaatatatcaatggatctcactttgaacaaaatgctaggggcagcagaacttattatgctattaaaaagacagaagagattaaaaaacaaccgattattttagatttacacgtcagctatgaaccaatcaaagatttgattattaaagcggaagtacaaaatctattagataaacgttatgttgatccattagatgctggaaatgacgcggcttcgcaacgttattattcaagtttaaatgattcaatttgtaataaaagtgcttgtgaagatggaggaaaagataaaaccgtgctttataactttgcacgtggaagaacttatattctgagtttaaactataaattctaa

SEQ ID NO: 2566 - protein, 944 aa, Haemophilus influenzae
MKKAIKLNLITLSLINTIGITITQAQAEETLGQIDVVEKVISNDKKPFTEAKAKSTRENVFKETQTIDQVIRSIPGAFTQQDKGSGVVSVNIRGENGLGRVNTMVDGVTQTFYSTALDSGQSGGSSQFGAAIDPNFIAGVDVNKSNFSGASGINALAGSANFRTLSVNDVITDDKPFGIILKGMTGSNATKSNFMTTAAGRKWLDNGGYVGVVYGYSQREVSQDYRIGGGERLASLGQDILAKEKEAYFRNAGYVLNAAGQWIPDLSKAHWSCNLDMPQYSGSQDPIVTANKYTGAREERYTDANCNVYIKQDGDSKFYNYRNVYENEERKKILEQFVKEKKDPSEITELQKGADGIEETNRSFEDNKDQYSVAPIEPGSLQSRSRSHLLKFEYGDDHHTLGAQIRTLDNKIGSRKIENRNYQVNYNFNNNSYLDLNLMAAHNIGKTIYPKGGFFAGWQVADKLIAKNVANIVDINNSHTFLLPKEIDLKTTLGFNYFTNEYSKNRFPEELSLFYVNESHDQGLYSLSNKGRYSGSQGLLPQRSVILQPSGKQKFKTVYFDTALSKGIYHLNYSVNFTHYAFNGEYVGYDNITLKEPILHKSGHKKAFNHSATLSAELSDYFMPFFTYSRTHRMPNIQEMFFSQVSNAGVNTALKPEQSDTYQLGFNTYKKGLFTQDDVLGVKLVGYRSFIKNYIHNVYGVWWRNGKVPDWAATNGFRFNIAHQNYQPIVKKSGAELELNYDMGRFFANVSYAYQRTNQPTNYADASPRPNNASKEDILKQGYGLSRVSMLPKDYGRLELGTRWFDKKLTLGMAARYYGKSKRATIEEEYINGSHFEQNARGSRTYYAIKKTEEIKKQPIILDLHVSYEPIKDLIIKAEVQNLLDKRYVDPLDAGNDAASQRYYSSLNDSICNKSACEDGGKDKTVLYNFARGRTYILSLNYKF

SEQ ID NO: 2567 - DNA, 1590 bp, Haemophilus influenzae
  misc_feature 9, 10, 11, 12, 13: n is any nucleotide
atggaatgnnnnntttttcctatcgttttactgatttatcttatggtaaaaagaaacgcgctaccttcttatgttgccttaccttggattgcgacattagttatgggtgttcatcttttacactttaatacagatattgtcactattagtgcaaatgttgtttctgcaattattgcggtacaaacacctattacagtaatttttggtgcgattctctttaaccgtttctctgaaatttcaggcgcaacaaatattatgcgaaaatggctaggaaatattaatccaaatcccgttgcacaattaatgattattggttgggcgtttgcttttatgatcgagggagcaagtggttttggtacaccagcggcaattgctgcacctattttagtgggattaggttttcatccattaaaagtggcgatgttggcacttattatgaactcagttcccgtatcctttggtgcggtaggtacaccaacttggtttggttttggtgctttaaaattatcagaagatatgattttagaaattgggtctattacagcatttatacactccattgctgcacttattatcccattattagcacttcgtatcttagtaaattgggatgatattcgtaaaaacatcgtatttatctatattagcgtactgggttgcgtagtaccttatttcttgattgctcaagtcaattacgaatttccatcactcgttgggggggcaatcggcttatttatttctgtatgggctgctaatcgcaatattggtttagcaaaagtaacaaatacccttgataataatgcggtaagtgcaggacaagtagttaaagcattattcccgacaggtttacttattgcatttttaattgtgactcgtattcatcaattaccattcaaagcaatgatgaatgacgcaactatttggttctcaaccacattaggttcgttaggattatttgaaattagtaaaggtttaatctttagcttaaaaaatatttttggctcaaatgtttcatcaagctataaacttctttacgtacctgcattgattccatttgtcattacagtactaattgcgattcctttctttaaaatttccagttcaaatgttaaacagatttttgtatcaagtttacaacaatctaaaaatccatttattgccttagttggtgccttagtgatggtaaacctaatgttagtgggtggcgaacattctatggtaaaaattattggtcgaacttttgctgaaatttctggtagtaactggactattttctcctctttcttaggcgcgattggatcgtttttctcgggttcaaataccgtatccaacctaacatttggtagtgttcaactttctaccgcagaaaccacaggcatttctgtcgcacttgttcttgctttacaatctgtcggtggggcaatggggaatatggtatgtatcaataacattgtagcggtaagttctgtgttaaatatttcaaaccaagaaggcacaattattaagaaaaccattataccgatgatcgtttacggtattattgccgcacttggcgcgttgttcttagtacctttattttataatctataa

SEQ ID NO: 2568 - protein, 529 aa, Haemophilus influenzae
  VARIANT 3, 4, 5: Xaa is any amino acid
MEXXXFPIVLLIYLMVKRNALPSYVALPWIATLVMGVHLLHFNTDIVTISANVVSAIIAVQTPITVIFGAILFNRFSEISGATNIMRKWLGNINPNPVAQLMIIGWAFAFMIEGASGFGTPAAIAAPILVGLGFHPLKVAMLALIMNSVPVSFGAVGTPTWFGFGALKLSEDMILEIGSITAFIHSIAALIIPLLALRILVNWDDIRKNIVFIYISVLGCVVPYFLIAQVNYEFPSLVGGAIGLFISVWAANRNIGLAKVTNTLDNNAVSAGQVVKALFPTGLLIAFLIVTRIHQLPFKAMMNDATIWFSTTLGSLGLFEISKGLIFSLKNIFGSNVSSSYKLLYVPALIPFVITVLIAIPFFKISSSNVKQIFVSSLQQSKNPFIALVGALVMVNLMLVGGEHSMVKIIGRTFAEISGSNWTIFSSFLGAIGSFFSGSNTVSNLTFGSVQLSTAETTGISVALVLALQSVGGAMGNMVCINNIVAVSSVLNISNQEGTIIKKTIIPMIVYGIIAALGALFLVPLFYNL

SEQ ID NO: 2569 - DNA, 465 bp, Haemophilus influenzae
  misc_feature 12, 13, 14, 15, 16: n is any nucleotide
atgaatgaatgnnnnntttttcttgcaggaatggatgtgagccgtttaattcgcacgcaagaagtggcagatgctgcgtcaaaagtagcagtctttcaaaaagtgcggtcagctttattacaacttcagcaagattttgcgaaaaatgatggattaattgcggatggcagagatatgggaacggttgtattcccaaatgcacaagtaaaattatttttagatgcaagtgctgaagaacgtgcaaaaagacgctataaacagttgcaaaataaaggaataaatggtaactttgcgcagattttagccgagataaaagagcgtgattttcgtgatagaaatcgtgaagttgcgccgctaaaaccagcagatgatgctttattattggatagtacaaccttgagtattggtgaagtaatcgatcaggcgttagcttatattcaagaaaaggtatcagttttgatttaa

SEQ ID NO: 2570 - protein, 154 aa, Haemophilus influenzae
  VARIANT 4, 5, 6: Xaa is any amino acid
MNEXXXFLAGMDVSRLIRTQEVADAASKVAVFQKVRSALLQLQQDFAKNDGLIADGRDMGTVVFPNAQVKLFLDASAEERAKRRYKQLQNKGINGNFAQILAEIKERDFRDRNREVAPLKPADDALLLDSTTLSIGEVIDQALAYIQEKVSVLI

SEQ ID NO: 2571 - DNA, 1650 bp, Haemophilus influenzae
atgtcagaatcttttgctcaactttttgaagaatcattaaaagtccttgaaactcgtcaaggttcaatcgttagcggtactgtagtagctatccaaaaaggctttgtgcttgttgatgcaggtttaaaatctgagtctgcaattccagttgctgaattcttaaatgcacaaggcgaactagaaatccaagttggcgatactgtaaatgttgcattagatgcagttgaagatggtttcggtgaaactaaactttctcgtgagaaagcggttcgtcacgaatcttggattgaattagaaaaagcttacgaagaaaaagcgaccgttatcggtttaatcaacggcaaagtgaaaggtggcttcacagttgagttaaacggtgttcgtgcattcttaccaggttctttagttgatactcgtccagcgcgtgaagcagatcacttacttggtaaagaattagaattcaaagtaatcaaattagatcaaaaacgtaacaacgttgttgtttctcgtcgtgcagtaattgaatctgaaaacagccaagaacgtgaacaagtattagaaaatcttgtggaaggttcagaagttaaaggtgtcgttaaaaacttaactgagtacggtgcattcgttgatcttggtggtgttgatggtttattacacatcacagatatggcttggaaacgtgttaaacacccaagtgaaatcgtaaatgttggcgatgaagttactgttaaagtattaaaattcgataaagatcgtactcgtgtatctttaggcttaaaacaattaggtcaagatccatgggcagcaattgctgaaaatcatccagtaaacagcaaattaacaggtaaagtaactaacttaactgactatggctgtttcgttgaaatcttagatggcgttgaaggtttagttcacgtttctgaaatggattggactaataaaaatatccacccatctaaagtggttagcttaggcgatactgtagaagtaatggtattagaaattgatgaagaacgtcgtcgtatttctttaggcttaaaacaatgtaaagctaacccttggactcagtttgctgatactcacaacaaaggcgataaagtaacgggtaaaatcaagtctatcactgatttcggtatcttcatcggtcttgaaggtggtatcgatggtttagttcacttatctgatatttcttggagtatttcaggcgaagaagctgttcgtcaatacaaaaaaggtgacgaagtgtcagctgttgtattagctgttgatgcagtaaaagaacgtatctctttaggtattaaacaacttgaagaagatccattcaataactttgtcgcaatcaataaaaaaggtgcggtagtatctgcaactgttgttgaagcggatgctaaaggtgctaaagttgaattagcaggtggtgttgaaggttatatccgttctgctgatttaacaagtgaagtagctgttggcgatgtcgttgaagcgaaatacactggagtagatcgtaaatctcgcattgttcacttatcagtgaaagcaaaagatcaagctgaagaagctgcggcagttgcaagtgtaaataacaaacaagaagatattgttattccaaatgcaatggctgaagcatttaaagcagctaaaggtgaataa

SEQ ID NO: 2572 - protein, 549 aa, Haemophilus influenzae
MSESFAQLFEESLKVLETRQGSIVSGTVVAIQKGFVLVDAGLKSESAIPVAEFLNAQGELEIQVGDTVNVALDAVEDGFGETKLSREKAVRHESWIELEKAYEEKATVIGLINGKVKGGFTVELNGVRAFLPGSLVDTRPAREADHLLGKELEFKVIKLDQKRNNVVVSRRAVIESENSQEREQVLENLVEGSEVKGVVKNLTEYGAFVDLGGVDGLLHITDMAWKRVKHPSEIVNVGDEVTVKVLKFDKDRTRVSLGLKQLGQDPWAAIAENHPVNSKLTGKVTNLTDYGCFVEILDGVEGLVHVSEMDWTNKNIHPSKVVSLGDTVEVMVLEIDEERRRISLGLKQCKANPWTQFADTHNKGDKVTGKIKSITDFGIFIGLEGGIDGLVHLSDISWSISGEEAVRQYKKGDEVSAVVLAVDAVKERISLGIKQLEEDPFNNFVAINKKGAVVSATVVEADAKGAKVELAGGVEGYIRSADLTSEVAVGDVVEAKYTGVDRKSRIVHLSVKAKDQAEEAAAVASVNNKQEDIVIPNAMAEAFKAAKGE

SEQ ID NO: 2573 - DNA, 285 bp, Haemophilus influenzae
atgactaagtcagaacttatggaaaaattgtcagcaaaacagccaactttacctgcaaaagaaattgaaaatatggtaaaagatattttagagtttatttctcaatctcttgaaaatggtgatcgtgttgaagttcgaggttttggtagcttttctttacatcatcggcaaccacgtttgggaagaaatccgaaaacaggcgattcagtaaacttatcagctaagtctgttccatattttaaagcgggtaaagaattaaaagctcgagtggatgttcaggcttaa

SEQ ID NO: 2574 - protein, 94 aa, Haemophilus influenzae
MTKSELMEKLSAKQPTLPAKEIENMVKDILEFISQSLENGDRVEVRGFGSFSLHHRQPRLGRNPKTGDSVNLSAKSVPYFKAGKELKARVDVQA

SEQ ID NO: 2575 - DNA, 294 bp, Haemophilus influenzae
atgattaaatatattttaggtattgtgatctttattgctattgtgttagttgcaattaccattggtgcgaataacgatcagattattacatttaattatattgtggcagaaagtcagtttcagctttcaagccttgttgctattttatttgggttaggtttaattcttggttggctaattactgcttttttctatattaagttaaaattaaaaaatatggcactagctcgtcaagtgaaacgtcagactttacaaatcaatgaattgacgactacgcgcgataaggtcgtttaa

SEQ ID NO: 2576 - protein, 97 aa, Haemophilus influenzae
MIKYILGIVIFIAIVLVAITIGANNDQIITFNYIVAESQFQLSSLVAILFGLGLILGWLITAFFYIKLKLKNMALARQVKRQTLQINELTTTRDKVV

SEQ ID NO: 2577 - DNA, 1191 bp, Haemophilus influenzae
atgatagaattactctttctattattgcctattgctgctgcctatggttggtatatggggcggcgtagtgcgaagaaagatcaagatgacataagcaataaactctcccgagattatgttacgggagtgaattttttactttccaatcaaactgataaagctgtagatttgtttttagatatgttgcaaaagcaagaaatcgaaaatgaaatcgaaagtcactcccaatttgaagcagaacttacacttggcaatctgtttcgttctcgaggcgaagttgatcgtgcattgcgcattcatcaagctttagatcttagtcctaattatacttttgaacaaaaattacttgcaaaacaacagcttgctcgagattttatggtggttggtttttttgaccgagctgagaatctttatattttactagtagatgaacctgagtttgcagaaaatgctttacagcaacttttagtgatttatcaaaagacaaaagaatggaaaaaagcagtcaatattgctgaaaaactcgctaaaataaagccacaagagaataatattgaacttgcgcaatgttattgtgaatattcacaaagtttagagcctgaaagtgcggttgaaaaacgcagtgttttacaaaaggctttgtcggtttctccgacttgtgttcgcgcttctttattgcttgcaaatttagcaatgcttgacggtcaatatcaacaagcagtaaaaatattagaaaatgttttggagcaaaatccagattatacgggtgaaattttgttacctttaaaacattgttacgaagaattaaatcagttagataattttgagttatttctaattcgtgcaggtcaaattattaataatgatgaagtagagctagctttggttaaattaattgaagaaaaagatggcaaatctgctgcgcaagctaagctttatcagcaactcacgaaaaagccaagtactttaattttccatcgttttatgcagtatcaaattgatgatgctgaagagggacggggaaaagaaagcttaattttattacataaaatggttggcgaaaggattaagcaaacatcgccttatcgttgtacaaattgtggttatcaaatccataagctattgtggaattgcccatcttgccgtcaatgggaaagtattaaaccagtttcaaatcaagaacataattaa

SEQ ID NO: 2578 - protein, 396 aa, Haemophilus influenzae
MIELLFLLLPIAAAYGWYMGRRSAKKDQDDISNKLSRDYVTGVNFLLSNQTDKAVDLFLDMLQKQEIENEIESHSQFEAELTLGNLFRSRGEVDRALRIHQALDLSPNYTFEQKLLAKQQLARDFMVVGFFDRAENLYILLVDEPEFAENALQQLLVIYQKTKEWKKAVNIAEKLAKIKPQENNIELAQCYCEYSQSLEPESAVEKRSVLQKALSVSPTCVRASLLLANLAMLDGQYQQAVKILENVLEQNPDYTGEILLPLKHCYEELNQLDNFELFLIRAGQIINNDEVELALVKLIEEKDGKSAAQAKLYQQLTKKPSTLIFHRFMQYQIDDAEEGRGKESLILLHKMVGERIKQTSPYRCTNCGYQIHKLLWNCPSCRQWESIKPVSNQEHN

SEQ ID NO: 2579 - DNA, 693 bp, Haemophilus influenzae
atgacaagtaaaattattgtggcattggattatgagaaagaagcagaggctcttgctttagttgatcaaattgatccaagtttgtgtcgattaaaagtgggtaaagaaatgtttactacacttggtattaattttgtaaaacaattacatcaacgtaattttgatgtttttttggatctgaaatatcacgatattccaaatacggtagcaagagcagttcgttctgctgctgatttaggcgtatggatggtggatttacacgcaagtggtggcttgcgtatgatggaagaagcgaagaaaattcttgaaccttatgggaaagatgcaccattgcttattgctgtgacggtattaaccagtatggaagacttggatttattacaaattgggattaatgcatcgccaatggaacaagttttacgcttagctcatttaacccaacgggcgggtttagatggtgtagtctgttcccctcaagaagttgaaattttacgtaacgcttgtggagaagactttaaattagtgaccccagggattcgtccaataggaactgattttggcgatcaaagacgtgtaatgacgcctactgcagcaattcgtgcaggttcagattatttagttattggacgcccaataactcaagcggataatcctgcggaggttctccgttctattaatttatctattgggtaa

SEQ ID NO: 2580 - protein, 230 aa, Haemophilus influenzae
MTSKIIVALDYEKEAEALALVDQIDPSLCRLKVGKEMFTTLGINFVKQLHQRNFDVFLDLKYHDIPNTVARAVRSAADLGVWMVDLHASGGLRMMEEAKKILEPYGKDAPLLIAVTVLTSMEDLDLLQIGINASPMEQVLRLAHLTQRAGLDGVVCSPQEVEILRNACGEDFKLVTPGIRPIGTDFGDQRRVMTPTAAIRAGSDYLVIGRPITQADNPAEVLRSINLSIG

SEQ ID NO: 2581 - DNA, 321 bp, Haemophilus influenzae
atgtcagattctgttttagtgtattcaacagatgtgggtcgaattaaagaggaaaaggcttctgtagttcgcccaaaaggagacggtgttgtacgtattcaaaaacaaacgagtggtagaaaaggtgctggcgtatcagttataactggtttagatttatctgatgaggaattgaaaaaattagctgctgaattaaaaaaacgttgtggatgtggtggagcagttaaaaatggtattattgaaattcaaggggaaaaacgagatttgctcaagcaattattagagcaaaaagggtttaaagttaaattatcaggtggatga

SEQ ID NO: 2582 - protein, 106 aa, Haemophilus influenzae
MSDSVLVYSTDVGRIKEEKASVVRPKGDGVVRIQKQTSGRKGAGVSVITGLDLSDEELKKLAAELKKRCGCGGAVKNGIIEIQGEKRDLLKQLLEQKGFKVKLSGG

SEQ ID NO: 2583 - DNA, 696 bp, Haemophilus influenzae
ttgaataagcaactccccttacctattcatcaaattgatgatgctacatcagagaacttttacggcgataataatcttttattgctcgattctttacgcaaaaattcatctgaattaaaacaaccgtttttctatatttggggaaataaaggttctggaaaaactcatctgcttagagcattcagtaacgaatatttaatcaatcaacgtactgctatttatgtaccccttagcaaatctcaatatttttctaccgcagttcttgaaaatttagagcaacaagaattagtatgcttagatgatttacaaagtgtaatcggaaatgatgaatgggaattagccatttttgatctgtttaatcgaattaaagcaagtgggaaaacgcttttactaattagtgcagataaatcgccttccgcactttctgtcaaattgcctgatttaaactctcgcttaacttggggggaaatttatcaattaaattcattaacagacgaacaaaaaatcaaagtactacaactcgcagcttaccaacgaggattccaattatctgacgaaactgcaaattttttaattacacgactagcacgagatatgcatactctatttgaagcacttgatctactagataaagcatcattacaagctcaacgaaatcttacgattcctttcgtcaaaaaaattttgaatctctaa

SEQ ID NO: 2584 - protein, 231 aa, Haemophilus influenzae
MNKQLPLPIHQIDDATSENFYGDNNLLLLDSLRKNSSELKQPFFYIWGNKGSGKTHLLRAFSNEYLINQRTAIYVPLSKSQYFSTAVLENLEQQELVCLDDLQSVIGNDEWELAIFDLFNRIKASGKTLLLISADKSPSALSVKLPDLNSRLTWGEIYQLNSLTDEQKIKVLQLAAYQRGFQLSDETANFLITRLARDMHTLFEALDLLDKASLQAQRNLTIPFVKKILNL

SEQ ID NO: 2585 - DNA, 1245 bp, Haemophilus influenzae
atgacaaaccaaatccctccttccctagcggaaaatcaaagcaaattaaaacaatctttcgttggcctacaaatgctttttgttgcatttggtgcgctagtactcgtgccattaattacaggccttgattccaatacggcattattaacggcaggcgttggcaccctactcttccaattttgcacaggcaaacaagtgcctattttcttggcatcatcttttgcctttatcgcacccattcaatatggcgtacaaacttggggaattgcgactacgatgggtggtttagcgttcactggtcttgtttatttcgccttgagcactttagtaaaattacggggagcagaagcattacaacgttttttcccaccagtggttgttgggccagtaattattatcattggcatggggcttgcacctattgcggtggatatgtccttaggcaaaaacagtgcctatgcttataacgacgctatattagtttcaatggtaacacttcttaccactttatctgtggcagtatttgccaaaggcttgatgaaacttattccaataatgttcggcattaccgcaggctatattttgtgtttgtttctgggtttaattaatttccaaccagtgattgatgcgccttggttcagtttgcccaaattaacgacacctgaatttaacctagaagccattctttatatgttaccaattgctattgcccccgccgtagaacacgttggcggtattatggcgattagctcggtaacaggtaaagactttttaaaaaaaccaggattacaccgcactttattaggcgatggcatcgctaccgctgctgcctctttagttggtggtccgcctaatacgacttatgcggaagttactggcgctgtgatgctaacacgcaactttaacccaaatattatgacttgggctgcagtttgggctattgcgatttcattctgtggaaaagtaggcgcattcctatcaaccattccaacgattgtaatgggtggaattatgatgcttgttttcggttcaatcgcagttgtgggcatgagtaccttaattcgcggaaaagttgatgttaccgaagctcgtaatctgtgtattatttctgtcgtaatgacatttggtatcggcaatatgtttgtagatgtgggtaacgtatcaataaaaggtatcagcttgtgcgcgattgttgctatcatcttaaaccttgttttaccgaaagcaaaaaatgaagtagaataa

SEQ ID NO: 2586 - protein, 414 aa, Haemophilus influenzae
MTNQIPPSLAENQSKLKQSFVGLQMLFVAFGALVLVPLITGLDSNTALLTAGVGTLLFQFCTGKQVPIFLASSFAFIAPIQYGVQTWGIATTMGGLAFTGLVYFALSTLVKLRGAEALQRFFPPVVVGPVIIIIGMGLAPIAVDMSLGKNSAYAYNDAILVSMVTLLTTLSVAVFAKGLMKLIPIMFGITAGYILCLFLGLINFQPVIDAPWFSLPKLTTPEFNLEAILYMLPIAIAPAVEHVGGIMAISSVTGKDFLKKPGLHRTLLGDGIATAAASLVGGPPNTTYAEVTGAVMLTRNFNPNIMTWAAVWAIAISFCGKVGAFLSTIPTIVMGGIMMLVFGSIAVVGMSTLIRGKVDVTEARNLCIISVVMTFGIGNMFVDVGNVSIKGISLCAIVAIILNLVLPKAKNEVE

SEQ ID NO: 2587 - DNA, 96 bp, Haemophilus influenzae
ttgggacaaaataatccccaaaaacaagacggcattctaagccgtcttttttccgtgcgtgaaacacaagaaaaactgaccgcacttttaagttaa

SEQ ID NO: 2588 - protein, 31 aa, Haemophilus influenzae
MGQNNPQKQDGILSRLFSVRETQEKLTALLS

SEQ ID NO: 2589 - DNA, 627 bp, Haemophilus influenzae
atgaaactggttgaagtaaaacatccacttgtaaaacacaaactaggtgtgatgcgtgaagctgagattgatacaaaaaaattccgtgaacttgcaacagaaatcggtagcctattaacctatgaagcaacctctgatttagaaactgaaaaagtaacgatcaacggttggaatgggccagtagaaatcgatcgaattaaaggtaaaaaagtaacggttgtaccaattttacgtgcaggtttaggaatgatggatggtgtacttgaacacgtaccaagcgcacgcatcagtgtagtggggatctaccgtaatgaagaaacccttgaaccagttccttacttccaaaaattagctagcgatttagaagagcgactttcaattgtggtcgatccgatgcttgcaactggcggttctatgattgccacccttgatcttttaaaagcaaaaggttgtaaacatatcaaagtattagtgttagtcgctgcaccagaaggaattaaagctcttgaggctgcacaccctgacattgaactttactgcgcttctattgatagccatttaaatgaacaaggttacattattcccggtcttggtgacgcgggcgataaaatttttgggacaaaataa

SEQ ID NO: 2590 - protein, 208 aa, Haemophilus influenzae
MKLVEVKHPLVKHKLGVMREAEIDTKKFRELATEIGSLLTYEATSDLETEKVTINGWNGPVEIDRIKGKKVTVVPILRAGLGMMDGVLEHVPSARISVVGIYRNEETLEPVPYFQKLASDLEERLSIVVDPMLATGGSMIATLDLLKAKGCKHIKVLVLVAAPEGIKALEAAHPDIELYCASIDSHLNEQGYIIPGLGDAGDKIFGTK

SEQ ID NO: 2591 - DNA, 2067 bp, Haemophilus influenzae
atgagctatcaagtcttagccagaaagtggcgaccaaaaacatttgctgatgtcgttgggcaagaacatattatcacggcattagcaaatggattaaaagataatcgactacatcacgcttacctcttttcaggcacgcgtggtgtaggaaaaacctctattgctagattattcgcaaaaggattaaattgtgttcacggcgtaacggcaacaccttgtggcgaatgtgaaaattgtaaagccattgagcaaggcaatttcattgatttaattgaaattgatgcggcgtctcgcacaaaagttgaagacacgcgtgaattattggataacgtgcaatataaaccagttgtgggcagatttaaggtttacttaatcgatgaagttcatatgctatctcgccattcatttaatgcgttgctcaaaactttagaagaaccgcccgaatatgtaaaatttttactcgcaacaacagatccacaaaaactacctgtaactattctttctcgctgtttacaatttcatcttaaagcattagatgaaacccaaatctcccagcatcttgcccatattttgacgcaagaaaatattccttttgaagatcccgcattagttaaacttgcaaaagcggcacaaggaagtattcgtgatagcttaagtttaacggatcaagccattgcaatgggcgaccgacaagttacaaataatgttgtaagcaatatgctagggttgcttgatgataactattctgttgatattttatacgccttacatcaaggcaatggcgaactcttaatgcgaacactgcaaagagttgcagatgcggcaggcgattgggataaattacttggcgaatgtgcagaaaaattacatcaaattgcgcttatgcaacttcttccacaaaaatcttcagataacaatgaacatttttcatttttagccaaacatatctctccagaaaatgttcagtttttttatcaagtcattgtttctggtagaaaagatttatcaaatgcaccaaatcgtcgtattggtgcagagatgacattattgagggcattggcattccacccaaagttccttacggcagtaccaaaggctaacaccactattactccaccgccatcaacgccaagtgcggttgaaaatacgggtaattatgtcgatgtgccagtactgtcgcaaagtatcaaatctgcttattctcaagtaaaactaaataaaacgagcattccaaatttggcaagcctttcggctttagatgcgcttgaacatttaacacaactggaaaaccaagaacgtcaagaacacaaagctgaatcattagctgtagtaagtgaaaccttacatcacatccaagaactagacgaagaaaaatctcataaaaaaatgaccgcacttcccgtgcgagaaatgactgagccgaagcccaagcacatagaaaagccaacattaccatcaaatgccgcacaggctccacaaaaaaatagcacagaagaaaattcaagtgataataatgtagaaattgctcaagatgagcaagaaatcttgagtgctgacacctatcgttgggaatggagcaatccagaacttgctaaagccgatacaggcgtttgtccttctgatataaaacaggcgattttaaaagatattacgcctgaattacgtttaaaaatcattacccaaactcaacaacaagatgagtgggcagatatagttgagcgttctggcttaacaggatttagcaaagaattagcattaaattgtttcttacaaagcaaaaccgatgatgaaatcaatcttggactacattcagaaaaatcccatttacgccaagacagaagtataaaaaatttagctgaagcattaagcaaattacaaggtaaagatattcgattaacaattaatcttgatgatagcaatgtcacgacgccaattgaatatcgccgcaatatttatcaagcattgcgggaaaaagctcaaaatgagttgcaaaaagatagtaaattacaaattctacttaatgagtttgatgcaaaattagatgtagagagtattcgaccagtttaa

SEQ ID NO: 2592 - protein, 688 aa, Haemophilus influenzae
MSYQVLARKWRPKTFADVVGQEHIITALANGLKDNRLHHAYLFSGTRGVGKTSIARLFAKGLNCVHGVTATPCGECENCKAIEQGNFIDLIEIDAASRTKVEDTRELLDNVQYKPVVGRFKVYLIDEVHMLSRHSFNALLKTLEEPPEYVKFLLATTDPQKLPVTILSRCLQFHLKALDETQISQHLAHILTQENIPFEDPALVKLAKAAQGSIRDSLSLTDQAIAMGDRQVTNNVVSNMLGLLDDNYSVDILYALHQGNGELLMRTLQRVADAAGDWDKLLGECAEKLHQIALMQLLPQKSSDNNEHFSFLAKHISPENVQFFYQVIVSGRKDLSNAPNRRIGAEMTLLRALAFHPKFLTAVPKANTTITPPPSTPSAVENTGNYVDVPVLSQSIKSAYSQVKLNKTSIPNLASLSALDALEHLTQLENQERQEHKAESLAVVSETLHHIQELDEEKSHKKMTALPVREMTEPKPKHIEKPTLPSNAAQAPQKNSTEENSSDNNVEIAQDEQEILSADTYRWEWSNPELAKADTGVCPSDIKQAILKDITPELRLKIITQTQQQDEWADIVERSGLTGFSKELALNCFLQSKTDDEINLGLHSEKSHLRQDRSIKNLAEALSKLQGKDIRLTINLDDSNVTTPIEYRRNIYQALREKAQNELQKDSKLQILLNEFDAKLDVESIRPV

SEQ ID NO: 2593 - DNA, 543 bp, Haemophilus influenzae
atgactacacaacttgatttaatcaaatcttctatcaaatcaattcctaattatccaaaagaaggcattatctttcgcgacattacgacccttttagaagttccagcagcttttaaagcaacaatagatcttattgtggaacaatatcgcgataaaggaattaccaaagtgcttggaactgaatctcgtggttttatttttggtgcccccgttgccttagcactaggtttacctttcgaattagtacgtaaacctaaaaaattaccacgtgaaactatttcgcaatcttatcaattagaatatggtcaagatactttggaaatgcacgttgatgcaatttcagaaggtgacaatgttttaattattgatgatttattagcaactggtggcaccgttgaagcgacagtaaaattagtgcaacgtttaggtggagcggtaaaacacgctgcatttgtgattaatttacctgaattaggtggcgaaaaacgcttaaataatttgggcgttgattgctatacactcgtcaattttgaaggtcattaa

SEQ ID NO: 2594 - protein, 180 aa, Haemophilus influenzae
MTTQLDLIKSSIKSIPNYPKEGIIFRDITTLLEVPAAFKATIDLIVEQYRDKGITKVLGTESRGFIFGAPVALALGLPFELVRKPKKLPRETISQSYQLEYGQDTLEMHVDAISEGDNVLIIDDLLATGGTVEATVKLVQRLGGAVKHAAFVINLPELGGEKRLNNLGVDCYTLVNFEGH

SEQ ID NO: 2595 - DNA, 1425 bp, Haemophilus influenzae
atgagtaaagaaattaaaacccaagtcgttgtacttggtgcaggtcctgcaggttattcagctgcattccgttgtgcggatttaggattagaaactgttattgttgagcgttattcaaccttaggtggggtgtgtttaaacgtaggttgtattccatctaaagcgttattacacgttgcaaaagtaattgaagaagcaaagcacgctaataaaaatggtatttattttagtgaaccacgcattgagctagatgaagtacgtgcaggtaaagaagctgttgttgctaaattaactggcggtttagcgggaatggcaaaagcacgtaaagtgactgttgttgaaggtttagcgacttttaccgattctcacacattagttgcgcgtgatcgcgatggaaacccaacgactgttaaattcgacaatgccattattgcggcaggttctcgtccagttcaattaccctttatcccacacgaagatcctcgtatttgggattcaacagatgcgctcaaattaaaagaagtaccgaaaaaactacttattatgggcggtggtatcatcggtttagaaatggggactgtatacaatgctttaggttctgaagttgaagttgttgaaatgttcgaccaagtgattcccgcagcagataaagatgttgttggtatttacactaaacaagttgagaaaaaattcaagttaatgcttgaaaccaaagtgactgcagttgaagcaaaagatgatggtatctacgtttcaatggaaggcaaagcctgtaatgacaccaaacgttatgatgcagtacttgtcgctatcggtcgtgtgccaaatggtaaattgattgatgcaggtaaagcaggtgttgaagtggatgatcgtggttttattcacgttgataaacaaatgcgtaccaacgtgccacatatctacgcaattggggatattgtaggtcagccaatgttagcacataaaggtgttaacgaaggtcacgttgccgcagaagtcattgcgggacaaaaacactacttcgatcctaaagtaattccatcaatcgcttataccgaaccagaagtggcgtgggtaggtaaaactgagaaagaatgtaaacaagaaggcttaaactacgaagtggctaaattcccttgggctgcatcaggccgcgcgattgcatctgaatgttcagaaggtatgacgaagttaatctttgataaagatacacatcgtgtactgggcggtgcaatcgtaggttctaatggcggggaattattaggcgaaatcggtcttgcaattgaaatgggttgtgatgcagaagatatcgcattaactatccacgctcacccaactttacacgagtctgttggcttagctgcggaagtatttgaaggctcaattactgacctgccaaatgcaaaagcgaagaaaaaataa

SEQ ID NO: 2596 - protein, 474 aa, Haemophilus influenzae
MSKEIKTQVVVLGAGPAGYSAAFRCADLGLETVIVERYSTLGGVCLNVGCIPSKALLHVAKVIEEAKHANKNGIYFSEPRIELDEVRAGKEAVVAKLTGGLAGMAKARKVTVVEGLATFTDSHTLVARDRDGNPTTVKFDNAIIAAGSRPVQLPFIPHEDPRIWDSTDALKLKEVPKKLLIMGGGIIGLEMGTVYNALGSEVEVVEMFDQVIPAADKDVVGIYTKQVEKKFKLMLETKVTAVEAKDDGIYVSMEGKACNDTKRYDAVLVAIGRVPNGKLIDAGKAGVEVDDRGFIHVDKQMRTNVPHIYAIGDIVGQPMLAHKGVNEGHVAAEVIAGQKHYFDPKVIPSIAYTEPEVAWVGKTEKECKQEGLNYEVAKFPWAASGRAIASECSEGMTKLIFDKDTHRVLGGAIVGSNGGELLGEIGLAIEMGCDAEDIALTIHAHPTLHESVGLAAEVFEGSITDLPNAKAKKK

SEQ ID NO: 2597 - DNA, 1662 bp, Haemophilus influenzae
atgtcaaaacaaattcaaattcctgatattggtagtgatgaagttaccgtaacagaagtgatggtaaacgtaggcgataccatttctgttgatcaatctatcattaacgttgaaggcgataaagcttcaatggaagtgcctgcaccagaagcgggtgttgtaaaagaaattttagtcaaagtgggcgataaagtttcaactggtactccaatgcttgtattagaagcggcaggtgctgctccagcagctgatgagcctactgctccagtagctgatgcgcctactgcaccagtggttgctaccgcaccaacggcttcagctattgtagaagtaaatgtgccagatattggtggtgatgaagtcaatgtaaccgaaattatggttgcagttggcgatacaatcactgcagaacaatctttaattaccgttgaaggcgataaagcctcaatggaagttcctgcaccattcggcggtgtggtaaaagaaattttagtgaaatcaggcgataaagtttcaactggttcattaattatgcgttttgaagtactaggtgcagctccagcagaatcagcttcagcttcaacatcagcaccacaggcagcagctcctgctactactgcacaagcaccacaggcagcagctcctgatactactgcacaagcagctcaatcaaataacaacgtatctggattaagccaagaacaagtagaagcaagtacaggatatgcacacgcaacaccagttattcgtcgtttagctcgtgaatttggtgtaaatctagataaagtaaaaggtactggtcgtaaaggtcgtatcgttaaagaagatattgaagcttatgtgaagaccgcagttaaagcttatgaaagcggtgcaacagcacaagctactggcaatggtgtagcaaatggtgctggattaggcttattgccatggccaaaagttgatttcagtaaatttggcgaaattgaagaagttgaattaagtcgtatcaacaaaatttcaggtgctaacttacatcgtaactgggtaataattccacacgttactcacttcgataaagcagatatcacggatttagaagcattccgtaaagaacaaaatgcgttagcagaaaaacaaaaacttggtgtaaaaatcacgccagttgtgttcattatgaaagcggtggcaaaagcattagaagcgtatccacgtttcaacagctcaattaccgaagatgctcaacgcttaatcctgaaaaaatatattaacatcggtgtcgcagtagatacgccgaatggcttagtagtgcctgtattcaaaaatgtgaacaagaaaggcattatcgaactttcacgtgaattaatggaagtatcgaaaaaagcccgtgaaggcaaattgactgcatcagatatgcaaggtggctgttttactatttcaagtcttggtggtattggtacaacgcactttgcgccaatcgtaaacgcaccagaagttgccatccttggtgtgtctaaatcatcgatggaaccagtatggaatggtaaagaatttgcgccacgcttaattcttccaatgtcattatcattcgaccaccgtgtcattgatggtgcagatggtgctcgtttcattagctatcttggctcggttttagcagatttacgtcgcttagtaatgtaa

SEQ ID NO: 2598 - protein, 553 aa, Haemophilus influenzae
MSKQIQIPDIGSDEVTVTEVMVNVGDTISVDQSIINVEGDKASMEVPAPEAGVVKEILVKVGDKVSTGTPMLVLEAAGAAPAADEPTAPVADAPTAPVVATAPTASAIVEVNVPDIGGDEVNVTEIMVAVGDTITAEQSLITVEGDKASMEVPAPFGGVVKEILVKSGDKVSTGSLIMRFEVLGAAPAESASASTSAPQAAAPATTAQAPQAAAPDTTAQAAQSNNNVSGLSQEQVEASTGYAHATPVIRRLAREFGVNLDKVKGTGRKGRIVKEDIEAYVKTAVKAYESGATAQATGNGVANGAGLGLLPWPKVDFSKFGEIEEVELSRINKISGANLHRNWVIIPHVTHFDKADITDLEAFRKEQNALAEKQKLGVKITPVVFIMKAVAKALEAYPRFNSSITEDAQRLILKKYINIGVAVDTPNGLVVPVFKNVNKKGIIELSRELMEVSKKAREGKLTASDMQGGCFTISSLGGIGTTHFAPIVNAPEVAILGVSKSSMEPVWNGKEFAPRLILPMSLSFDHRVIDGADGARFISYLGSVLADLRRLVM

SEQ ID NO: 2599 - DNA, 2661 bp, Haemophilus influenzae
atgtctgagattttaaaaaatgacgttgatccaatcgaaacacaagattggttgcaatcattagattcattaattcgtgaagagggcgttgagcgtgctcaatatattgttgagcaagttattggtcaagcacgtacaagtggtgtttcattgccaacaggagttaccactgattacgtgaatactattcctgtggctgagcaacctgcttatccaggtgatcacgccatcgaacgtcgtattcgttcagcagtacgttggaatgcgatcgcgatggttttacgcagtcagaagaaagatcttgatttaggtgggcatatttccactttccaatctgcagcaacaatgtatgaagtttgctacaaccacttttttaaagctgcaacagagaaaaatggcggcgatttaattttcttccaaggccatgcagctcctggtatgtatgcgcgtgctttcttagaaggtcgtttaactgaagaacaaatggataacttccgtcaagaagcctttactgatggtttatcttcatatccgcaccctaaattaatgcctgaattttggcaattctctacggtttctatgggtttaggccctgtgaatgccatctaccaagcgcgtttcttaaaatatctcgataaccgtggtttaaaagatactaaagatcaaaaagtttatgcgttcttaggcgatggcgagatggatgaaattgagtctaaaggtgcattaacttttgcggctcgtgagaagttagataacttaatcttcactatcagctgtaacttacaacgtttagatggccctgtgaatggtaatggtaaaatcgttcaagagttagaaggactatttactggtgctggctgggaagtgattaaagttttatggggcagcgattgggataaattattcgcgaaagatacttcaggtaaattaactcagttaatgatggaagtggttgatggagactatttaacctttaaatctaaagatggtgcatatattcgtgaacacttcttcggtcgttatccagaaactgctgcattagttgctgatatgaccgatgatgaaatctgggcattacgccgtggtgcacacgatagcgaaaaattatatgcagcctatgcaaaagcacaaaatgcaacgaaaccagttgtgattttagcgcatcaagttaaaggttataaaattcctgaagcggaaagtaaaaataccgctcaccaatctaaaaaaatgtcttacgaaagccttaaaggtttccgtgacttctttgaattaccattaaccgatgaacaagtagaaaaattagaatacattaaatttgctgaaggcacacctgagtatgaatacttacatggtcaccgtaaagcattaaacggttatgttcctgctcgtcgtactaaatttgatgttgaatataaagttcctgcattagaagagtttaaagcattattagaagaacaacctcgtggtatttcaaccactatggcgtttactcgtgcattaaacatcttattaaaagataaaaacatcggtaaaactatcgttccaatgattgcggatgaagcgcgtactttcggtatggaaggtttattccgtcaagttggtatttataacccacatggtcaaaactatgttccttcagaccgtgatttagtggcttactatcgtgaagcaaaagatggtcaagtactacaagaaggtatcaatgaattaggtgcaaccgcatcttggttagcagcagcgaactcgtactctgtcaataaccaaccgatgattccattcttcatctattactcaatgtttggtttccaacgtgtgggcgatatgatgtgggctgcaggcgaccaattagctcgtggctttatggtagggggtacttctggtcgtacaaccttaaatggcgaaggtttacaacacgaagatggccacagccatattcaagcgggtatcattcctaactgtatcacttacgatccatcattcgcttttgaagttgctgtaattatgcaagacggtatcaaccgtatgtacggcgaaagacaagaagatgtattctattatatgactacattaaatgaagtgatggatcaacctgcaatgcctgctggtgcggaagaaggtatccgtaaaggtttatataaatttgaaacagtggaaggtaaaaaaggcaaaggtcacgttcagttattaggttctggtgcgattatgcgtcacgttcgtgaagcggcacaaattcttgcaaatgactacggtgtgacttcagatgtattttctgcgccttcattcaatgaattagcacgcgaaggtcatgatgcagcacgttggaacttattacacccaacagagacacaacgcgtaccatacgttgctcaagtattagctgatttaccaaccgttgcttcaactgactatgtgaaaggttatgctgatcaaatccgtgcatttgtaccaagtaagcactatcatgtattaggtacagacggtttcggtcgttcagatagccgtgcaaacttacgtgaacacttcgaagttgatgcacgttatgttgtggttgctgcactttctcaattagcgaaagaaggtacagtatctaaccaagtggttgcagatgcgattgcgaaattcggtttgaatgtagatcgtatcaatccgctttatgcgtaa

SEQ ID NO: 2600 - protein, 886 aa, Haemophilus influenzae
MSEILKNDVDPIETQDWLQSLDSLIREEGVERAQYIVEQVIGQARTSGVSLPTGVTTDYVNTIPVAEQPAYPGDHAIERRIRSAVRWNAIAMVLRSQKKDLDLGGHISTFQSAATMYEVCYNHFFKAATEKNGGDLIFFQGHAAPGMYARAFLEGRLTEEQMDNFRQEAFTDGLSSYPHPKLMPEFWQFSTVSMGLGPVNAIYQARFLKYLDNRGLKDTKDQKVYAFLGDGEMDEIESKGALTFAAREKLDNLIFTISCNLQRLDGPVNGNGKIVQELEGLFTGAGWEVIKVLWGSDWDKLFAKDTSGKLTQLMMEVVDGDYLTFKSKDGAYIREHFFGRYPETAALVADMTDDEIWALRRGAHDSEKLYAAYAKAQNATKPVVILAHQVKGYKIPEAESKNTAHQSKKMSYESLKGFRDFFELPLTDEQVEKLEYIKFAEGTPEYEYLHGHRKALNGYVPARRTKFDVEYKVPALEEFKALLEEQPRGISTTMAFTRALNILLKDKNIGKTIVPMIADEARTFGMEGLFRQVGIYNPHGQNYVPSDRDLVAYYREAKDGQVLQEGINELGATASWLAAANSYSVNNQPMIPFFIYYSMFGFQRVGDMMWAAGDQLARGFMVGGTSGRTTLNGEGLQHEDGHSHIQAGIIPNCITYDPSFAFEVAVIMQDGINRMYGERQEDVFYYMTTLNEVMDQPAMPAGAEEGIRKGLYKFETVEGKKGKGHVQLLGSGAIMRHVREAAQILANDYGVTSDVFSAPSFNELAREGHDAARWNLLHPTETQRVPYVAQVLADLPTVASTDYVKGYADQIRAFVPSKHYHVLGTDGFGRSDSRANLREHFEVDARYVVVAALSQLAKEGTVSNQVVADAIAKFGLNVDRINPLYA

SEQ ID NO: 2601 - DNA, 96 bp, Haemophilus influenzae
atgcaatattttactggttattttagcgaacaaaaaaacacaaaaaaattaccgcactttcaaataattatttatggcaaagctgatttgatatga

SEQ ID NO: 2602 - protein, 31 aa, Haemophilus influenzae
MQYFTGYFSEQKNTKKLPHFQIIIYGKADLI

SEQ ID NO: 2603 - DNA, 459 bp, Haemophilus influenzae
atgcagacaacaactcgaaccctcactcaacacaaacgtattgcacttgtggctcacgatagttgtaaaaaaaatttactgaattggacgcaaaaacacaaagaggcacttaagcctcatatactttatgcaacaggtacaacagggcatattttagaacgagaaacaggtttaagcattcaatctttattaagtggcccaatgggcggcgatcaacaacttggtggattaatcgcagaaaagaaaatcgacatgatgatcttcttttgggatccaatgaatgctgcaccacatgatcctgatgtgaaagcccttatgcgtattgcaacagtgtggaatatccctgttgcgattaatcaaagctctgcagattttcttttaacttcagttttatttgaacaagatgtggaaattgacgtaccagattatgaggggtatttaaaagagcggttagcttaa

SEQ ID NO: 2604 - protein, 152 aa, Haemophilus influenzae
MQTTTRTLTQHKRIALVAHDSCKKNLLNWTQKHKEALKPHILYATGTTGHILERETGLSIQSLLSGPMGGDQQLGGLIAEKKIDMMIFFWDPMNAAPHDPDVKALMRIATVWNIPVAINQSSADFLLTSVLFEQDVEIDVPDYEGYLKERLA

SEQ ID NO: 2605 - DNA, 1443 bp, Haemophilus influenzae
atgaaaaaatcaaaaattgctgcaggcgtagtggttgcccttgctgccgtttggtgcacaagtgcatggtttacagggaaaaaagctgaagaagaatatttatatcaactaaaacagttaaatcaactatttaccaaaattgaggcattagaagaaagtaaaattttttataaaaatataaaatttgaaagaggattatttgcctctcacattcaagatcaaatagaaattcacaaggcaaatgaaacgatcattattcctttatcatcaacactttatcacgggcctttgccgcttgatcgtgtggcaaaactgaatttcgttccagccattttttcaagccaaacattgttaggaaaaaatgcaacaactcaggcattctttgatatcacagaatcagagaaaccgttacaactgaatttcgcaatgaattattcattaagcggtaatgcggaattaaaacttgcatcggggcaatatcacaatgaacaatctaagacagattttgattggtcaaatgtcgtattaaatattgatttaaaccaaaatacaccaaataactatgtgctatctgtcgatacatttaattcaaatgcccctaatcatgcagtttcaaccgcttcatcaattaaaataaaagatcttgtcgtacaaggctcgttgcaaagcacaaaatggccatttatttatagtgggaatatcaatagtaaaataggctattttgagcaaaataccgaatctgcagagagtggcgaaaaattctctcttattcagaaaaacagccaagcaaatttaactacacaagttgagggtgatacggtaaatatcatcaataaaacaaatctggatgaattacatattaacggtaacaacttaggtaaagtgaccaacaatgtagaattcaaccatattgatggcaacgcattacaagaacttttaaatattttagttgcaataggcaaagccgactcagatatgcctttatctaaaacattggtgcaaaaattacaacaagcaggcatgatcattgcgaataatcaacctcaaattaaatttacccctctttctatttctgatgaaaaaggcaaagtagcattggatataaatattgctttagtgccaaatcctaaatttgatttaatgcgcagtggcttatacaaacaattcaaagatttttcgatcaattttgatgtgaacaaagaaaccgcaatttcattgttatctaaatttgtaccagaaaaccaaaagcaagatttcgttcaccgattgaatgaattagttaccgaaggtgaagtgaatgacattatcgtaaacacggacaaaaccgtaacattaacgcttgctctagaaaataacgacttgaaactaaacggcaagccaatcccagaagaacagttgaaagtgatactctttatacttgtaatggggggatttgggagataa

SEQ ID NO: 2606 - protein, 480 aa, Haemophilus influenzae
MKKSKIAAGVVVALAAVWCTSAWFTGKKAEEEYLYQLKQLNQLFTKIEALEESKIFYKNIKFERGLFASHIQDQIEIHKANETIIIPLSSTLYHGPLPLDRVAKLNFVPAIFSSQTLLGKNATTQAFFDITESEKPLQLNFAMNYSLSGNAELKLASGQYHNEQSKTDFDWSNVVLNIDLNQNTPNNYVLSVDTFNSNAPNHAVSTASSIKIKDLVVQGSLQSTKWPFIYSGNINSKIGYFEQNTESAESGEKFSLIQKNSQANLTTQVEGDTVNIINKTNLDELHINGNNLGKVTNNVEFNHIDGNALQELLNILVAIGKADSDMPLSKTLVQKLQQAGMIIANNQPQIKFTPLSISDEKGKVALDINIALVPNPKFDLMRSGLYKQFKDFSINFDVNKETAISLLSKFVPENQKQDFVHRLNELVTEGEVNDIIVNTDKTVTLTLALENNDLKLNGKPIPEEQLKVILFILVMGGFGR

SEQ ID NO: 2607 - DNA, 1908 bp, Haemophilus influenzae
atgggaaaaattattggtattgacttaggtacaacaaactcttgtgtagctgtaatggacggcgataaagtgcgcgttattgaaaatgcagaaggggcacgtactactccgtcaatcattgcatatacagataatgaaatcttagtaggtcagccagcaaaacgtcaagcaatcactaacccaaaaaatacattgtttgcgattaaacgtttaattggtcgtcgttttgaaagtgaagaagttcaacgcgatattaaaattatgcctttcgaaattactcgtgccgacaatggcgatgcgtgggtaaacgtgaaaggcgacaaattagccccaccgcaaatttcagcagaagtgttgaaaaaaatgaaaaaaactgcagaagatttcttgggtgaagcggtaactgaagcagtaattactgtgcctgcatactttaatgatgcacaacgtcaagcaacgattgatgcaggtaaaattgcaggcttagatgtaaaacgtatcattaatgaaccaacagcggctgcgttagcgtttggtttaggttcaagcaaagagaaccaagtgatcgctgtttacgacttaggtggtggtacatttgatatttcaatcatcgaaattgataactttgatggcgaacaaactttcgaagtattggcaaccggtggtaacactcacttaggtggtgaagactttgataaccgtgtaattgattacattattgatgagttcaaaaaagaacaaaacattgatttacgtaatgatgcgatggcattacaacgtgtgaaagaagctgcagagaaagcaaaaattgaactttcatcagctcaatctactgaagtgaaccttccgtacatcactgcagatgcgacaggccctaaacacttagcattaaatatcactcgtgcaaaattagaagcattagtagaagatttagtggcaagctcaattgagtctttgaaagcggtattaaaagatgcagataaaggtgtaagcgaaatccacgatattattcttgtgggtggccaaactcgtatgccacttgtacaacaaaaagttgctgaattctttggtaaagaagcacgtaaagatgtgaaccctgatgaagcggtggcaatcggtgcggcagttcaaggtggtgtattaaaaggtgatgtgaaagatgttcttttattagacgtaactccattatctttaggtatcgaaaccatgggcggtgtgatgaccactttaattgagaaaaataccacgattccaactaaaaaatcgcaagtattctcaacagcagaagataaccaaagtgcggtaactattcacgttcttcaaggcgaacgtaaacgtgcagcagacaataaatctttaggtcaattcaacctagaaggtattaatcctgcaccgcgtggtatgccacaaattgaagtaacatttgatatcgatgcaaacggcgtaatcaacgtatcagcaaaagataaaaatacgggtaaagagcaacaaattcgtattcaagcatcatctggtttatctgatgaagaaattcaacaaatggtgcgtgatgcagaagcaaatgctgatgcagaccgtaaatttgaagaagttgttcaagctcgtaaccaagcagatggtattgctcacgcaacacgtaaacaaattgcagaagctggcgatgcattgagtgtcgcagacaaagagaaaattgaagctgcagtcgctgagcttgaaacagcggcaaaaggcgaagataaagcagaaattgaagcaaaaattgaagcggtaattaaagcctctgaaccattaatgcaagcagtgcaagcaaaagctcaacaagctggtggcgagcaaccacaacaatcatcagcaaaagatgatggcgtggtagatgctgaatttgaagaagtgaaagataataaataa

SEQ ID NO: 2608 - protein, 635 aa, Haemophilus influenzae
MGKIIGIDLGTTNSCVAVMDGDKVRVIENAEGARTTPSIIAYTDNEILVGQPAKRQAITNPKNTLFAIKRLIGRRFESEEVQRDIKIMPFEITRADNGDAWVNVKGDKLAPPQISAEVLKKMKKTAEDFLGEAVTEAVITVPAYFNDAQRQATIDAGKIAGLDVKRIINEPTAAALAFGLGSSKENQVIAVYDLGGGTFDISIIEIDNFDGEQTFEVLATGGNTHLGGEDFDNRVIDYIIDEFKKEQNIDLRNDAMALQRVKEAAEKAKIELSSAQSTEVNLPYITADATGPKHLALNITRAKLEALVEDLVASSIESLKAVLKDADKGVSEIHDIILVGGQTRMPLVQQKVAEFFGKEARKDVNPDEAVAIGAAVQGGVLKGDVKDVLLLDVTPLSLGIETMGGVMTTLIEKNTTIPTKKSQVFSTAEDNQSAVTIHVLQGERKRAADNKSLGQFNLEGINPAPRGMPQIEVTFDIDANGVINVSAKDKNTGKEQQIRIQASSGLSDEEIQQMVRDAEANADADRKFEEVVQARNQADGIAHATRKQIAEAGDALSVADKEKIEAAVAELETAAKGEDKAEIEAKIEAVIKASEPLMQAVQAKAQQAGGEQPQQSSAKDDGVVDAEFEEVKDNK

SEQ ID NO: 2609 - DNA, 1185 bp, Haemophilus influenzae
gtgtatttattttcagcaacaaattacaaaattactatggcaaaaaaagattactacgaagtccttggcctacaaaaaggggcgagtgaggacgacatcaaacgtgcgtataaacgtttagcgtctaaacatcaccccgataaaaaccaaggcagtaaagaagcagaagaaaaattcaaagaaattaatgaagcttatgaagtattaggcgacgatcaaaaacgcgcagcctacgatcaatatggccacgcagcctttgaacaaggtggtggcactggtggcttcggtggcggctttggcggtgctgattttggtgatatgttcggtgatatttttggcgatattttcggtggtggtggacgtggtcgtcagcgcgttgttcgtggcgaagacttacgttatgacttagaaattagcctagaagaagccgtaaaaggtacaaccaaagatattcaaatcaatactcttgcacattgtgatagctgtggtggctctggggctgaaaaaggttctaaagtggaaacttgtccgcattgtcacggttctggtcgaattcgccgtcagcaaggtttcttcgtatctgaaagtatttgtccaacttgtcacggtagcggtaagaaaattgaaaaaccttgtcgcagttgtcatggagaaggacgagttcataagaaagaaaatctttcagtaaaaattcctgcaggcgtagatacgggcaaccagcttcgcttagctggtaaaggtgcagcaggtgaaaatggcgcaccagctggagatttatatgttgtgattcacgtgagagaacataatatttttgaacgtgatggctctaatctttactgtgaagtaccgattagctttgctactgcagcacttggcggtgaaattgaagtgccgactttagatggtcgggtaaaactcaaaattcctgcagaaactcaaacgggaaaattattccgtatgcgaggcaaaggtgttgcttctacacgtagtggttatgcgggtgatttaatttgccgtatcgtggtagaaacgccagttaatttaactagcgaacaaaaagaattacttcacaaacttgaagaaagtttacaaggtaaagatttaagtaaacatgcaccaaaatcttcaggatttttagacggtgtgaaaaaattctttgataacttgggtaaatctgacaaataa

SEQ ID NO: 2610 - protein, 394 aa, Haemophilus influenzae
MYLFSATNYKITMAKKDYYEVLGLQKGASEDDIKRAYKRLASKHHPDKNQGSKEAEEKFKEINEAYEVLGDDQKRAAYDQYGHAAFEQGGGTGGFGGGFGGADFGDMFGDIFGDIFGGGGRGRQRVVRGEDLRYDLEISLEEAVKGTTKDIQINTLAHCDSCGGSGAEKGSKVETCPHCHGSGRIRRQQGFFVSESICPTCHGSGKKIEKPCRSCHGEGRVHKKENLSVKIPAGVDTGNQLRLAGKGAAGENGAPAGDLYVVIHVREHNIFERDGSNLYCEVPISFATAALGGEIEVPTLDGRVKLKIPAETQTGKLFRMRGKGVASTRSGYAGDLICRIVVETPVNLTSEQKELLHKLEESLQGKDLSKHAPKSSGFLDGVKKFFDNLGKSDK

SEQ ID NO: 2611 - DNA, 1254 bp, Haemophilus influenzae
atgttagaacaaatgggtaaacaagccaaagatgctgcatttatcttggctcaactcaccactgctgaaaaaaatcgtgcattatccattattgcagaacaactcgaacaacaagcaccgcttatcttagccgaaaacgcaaaagatattgaacttgccaaacaaaatggattatcggatgccttcattgatcgcttactgctcacacaagaacgtttacaaggcattgctaatgatgtacgccatgttatttcacttgcagatcccgtagggaaaatcatagacggcggtacattggatagcggacttaaaatcgaacgcgtacgcacgccgctcggtgtcattggcacaatttatgaagctcgcccaaatgtgaccattgatgtggcaagtctttgccttaaaaccggtaatgcagtgattttacgcggcggtaaagaaacgcagttttctaacaaaattctaatcgaagttgtgcaaaatactttagagcaagcaggcttaccaaaatttgcggtgcaagccattaccgatccaaaccgtgaactcgttatgcaattattaaaactggatcgctatgtggatatgattattcctcgtggtggagcgggtttacatgaattgtgtaaacaacattcgactattccagttattgtgggtggcgtgggtgtttgccatactttcgttgaagaaagtgcggatcaaaataaagcggtttttgttattgataacgccaaaacccaacgtccaagcacctgtaacacattggaaacattgttagttcaacattctattgctgaagaatttttaccaaaactcgtctctcacctttccgctaaaaacgtaaaatatcatgcaaaatccaccgcacttaatatattgaaacaagcaggtgcgaatgtctgcgaagtgacagaaaaagaattgcgaaaagaatggggatcattggatttgaatgtggttgttgtggaagatattcatgccgctattgagcatattcgccaatatggtacacaacattctgaaagtattttaacgtcctcacaaaacctagcccgtcaatttatcaatcaagttgatgcggcagccgtttatgtaaatgcaagcacacgctttactgatggcggacaatttggattaggcgcagaagttgccgtgagtacccaaaaacttcatgctcgtggcccaatgggattagaagcattaaccagttataaatgggtttgtgaaggcgaatatactgtccgcaaataa

SEQ ID NO: 2612 - protein, 417 aa, Haemophilus influenzae
MLEQMGKQAKDAAFILAQLTTAEKNRALSIIAEQLEQQAPLILAENAKDIELAKQNGLSDAFIDRLLLTQERLQGIANDVRHVISLADPVGKIIDGGTLDSGLKIERVRTPLGVIGTIYEARPNVTIDVASLCLKTGNAVILRGGKETQFSNKILIEVVQNTLEQAGLPKFAVQAITDPNRELVMQLLKLDRYVDMIIPRGGAGLHELCKQHSTIPVIVGGVGVCHTFVEESADQNKAVFVIDNAKTQRPSTCNTLETLLVQHSIAEEFLPKLVSHLSAKNVKYHAKSTALNILKQAGANVCEVTEKELRKEWGSLDLNVVVVEDIHAAIEHIRQYGTQHSESILTSSQNLARQFINQVDAAAVYVNASTRFTDGGQFGLGAEVAVSTQKLHARGPMGLEALTSYKWVCEGEYTVRK

SEQ ID NO: 2613 - DNA, 585 bp, Haemophilus influenzae
atggatatttttggcgtgatcattatcgcatccgtcactgccattggtggcggttctgtgcgtgatgtactgcttgggcattatcctctcggctgggttaagcacccagaatattttttaatggtggcaagtgcggcggtaattaccgtatatgttgcaccattcatcaatcattttatgcgctactttcgcactattttcttggtgctcgatgcgatgggtttagtagtgtattccattattggcgcacaaattgcgatagatatgggacatagccttaccattgtttgcattgcaggctgtattacgggtgcctttggcggggttttacgcgatatgctatgcaatcgaattcctctcgtattccaaaaagaactctatgccagcattgcgctatttgccacgctgacttattacgcattaagtacacttcaagtagaacatacgcttgccgtgttactcacacttattagcagctttactttacgccttttagctattcatttcgaatgggggttgccggtgtttaattaccaagaactcacatcggaagaacaagataagctgccaaataaaaagaaataa

SEQ ID NO: 2614 - protein, 194 aa, Haemophilus influenzae
MDIFGVIIIASVTAIGGGSVRDVLLGHYPLGWVKHPEYFLMVASAAVITVYVAPFINHFMRYFRTIFLVLDAMGLVVYSIIGAQIAIDMGHSLTIVCIAGCITGAFGGVLRDMLCNRIPLVFQKELYASIALFATLTYYALSTLQVEHTLAVLLTLISSFTLRLLAIHFEWGLPVFNYQELTSEEQDKLPNKKK

SEQ ID NO: 2615 - DNA, 801 bp, Haemophilus influenzae
atgtcagaacaatcttctaaatatatcgcagcattgcttgcggtattatcgatctcaatggtgcttggcatcgatctatttattttttctttgcaatctgaaaagcaaacaatgcctcatttaggtgtaggcgtgttggttgcacagttaatttctttattggtgttttatcgtggcgaaatttgcccaggacaacgtggtcgtttaatcaaagtgaatatgacttttgctatttattgggcagtgtggttgctgataagcctattacaaaataatcacacgcttactaacgtgatgagcgtatgtggtctttctgtcgtgtattttatttggaaacaacccaaaactgaaaaaattcgtaacagctttttattgatggctgcattaattgcgggtttaggttgcttgagttatttaatgatttttaccgtgcttcctgcgagtgattttgctgaatataacccttttgcaccaattttatctggcgtgattttagcaaatcttgtgcttgttattgcacgaaatcgtttacaaggttttatagcattgttgcccttagccatgattatattgctggccttaaatgctttggcaatgttcttatttttacttttaaatggcatggaaagtgcggttaattctgacagtattttcgcttacatcatttattttgtttgccattttgcgattgcggctattctgattctgcatagtttccaaaagtggacattatctaccaatagtttatttatcctattatttattgctgtttgcttgccgttatggatggtttttgtttaa

SEQ ID NO: 2616 - protein, 266 aa, Haemophilus influenzae
MSEQSSKYIAALLAVLSISMVLGIDLFIFSLQSEKQTMPHLGVGVLVAQLISLLVFYRGEICPGQRGRLIKVNMTFAIYWAVWLLISLLQNNHTLTNVMSVCGLSVVYFIWKQPKTEKIRNSFLLMAALIAGLGCLSYLMIFTVLPASDFAEYNPFAPILSGVILANLVLVIARNRLQGFIALLPLAMIILLALNALAMFLFLLLNGMESAVNSDSIFAYIIYFVCHFAIAAILILHSFQKWTLSTNSLFILLFIAVCLPLWMVFV

SEQ ID NO: 2617 - DNA, 1197 bp, Haemophilus influenzae
atgaatcaacaaaaatcgactttcatctttattcttaccctcggtattctctctatgctaccgccctttggcgtggatatgtatttgccgtcttttttagaaattgcaaaggatctcgacgtaagtccagaacaagtacaacacacgctcacctcttttgcttatggcatggcgtttggtcagcttttttgggggccttttggtgatagtttcggacgaaaaccgatcattttactcggtgttattgtgggcgcactaacagctttagtacttaccgaaataaattcagttggaaattttaccgcacttcgttttgtgcaaggtttctttggtgccgcacctgttgtgctttcaggcgcattattacgtgatttatttagtaaagatcagctatccaaagtgatgtccaccatcacgttagtgtttatgcttgcacctttagttgcaccaatcattggtggttacatcgttaaatttttccattggcatgcgattttttacgttatttcgcttgtgggattattagccgctgcattggtctttttcatcattccagaaacccataaaaaagaaaatcgcattccgctgcgcttaaatattatcgctcgcaatttccttctgctttggaagcaaaaagaagtgcttggctatatgtttgccgcctcttttagctttggtgggttgtttgcttttgtgacggcaggatcaattgtctatatcggcatttatggcgttcccgtcgatcagttcggttatttctttatgatgaatatcgttacgatgatctttgcctcctttttgaatagccgatttgttactaaagtgggtgcagaaacaatgttacggatagccctcgcaattcaattcctttctggaatgtggctaattttgaccgcacttttagatcttggtttttggccaatggcaattggcgtcgcctttttcgtcggtccaaacccagtgatttcatcaaatgcaatggcatcagctttagaaaaatgtcctcaaatggcgggaacaacaaattctttgattggtagcgtacgttttgcagtgggtgcaattatgggaagtttagtcgcgtcaatgaaaatggatactgccgcaccaatgctctttactatgggggcatgtgtcgtgatttccgtgttggcgtattactttctaaccagccgaaatcttaaaagccgtgggtaa

SEQ ID NO: 2618 - protein, 398 aa, Haemophilus influenzae
MNQQKSTFIFILTLGILSMLPPFGVDMYLPSFLEIAKDLDVSPEQVQHTLTSFAYGMAFGQLFWGPFGDSFGRKPIILLGVIVGALTALVLTEINSVGNFTALRFVQGFFGAAPVVLSGALLRDLFSKDQLSKVMSTITLVFMLAPLVAPIIGGYIVKFFHWHAIFYVISLVGLLAAALVFFIIPETHKKENRIPLRLNIIARNFLLLWKQKEVLGYMFAASFSFGGLFAFVTAGSIVYIGIYGVPVDQFGYFFMMNIVTMIFASFLNSRFVTKVGAETMLRIALAIQFLSGMWLILTALLDLGFWPMAIGVAFFVGPNPVISSNAMASALEKCPQMAGTTNSLIGSVRFAVGAIMGSLVASMKMDTAAPMLFTMGACVVISVLAYYFLTSRNLKSRG

SEQ ID NO: 2619 - DNA, 699 bp, Haemophilus influenzae
atgagattagataaatttattgctgaaaatgtgggattaactcgttctcaagcaacaaaagcgatccatcaaagtgcggtaaaaattaatggtgaaattgtcaaaagtggctcagtacaaatttcacaagaagacgaaatttattttgaagatgaattattaacttgggtagaagaaggccagtattttatgttgcataaaccacaaggctgtgtttgttctaatgatgacggcgactatccaactatttatcaattttttgattaccctttagctggaaaattacatagcgcaggtcgcttagatgtggatacgacaggtctcgtattgcttaccgatgatggacaatggtcacatcgcatcacttccccaaagcatcattgtgaaaaaacctatttggtaacattagctgatcccgtagaagaaaattatgcagcggcttgttcggaaggtattttattacgcggagaaaaagagccaactaaaccagcaaaattagaaattttagatgactacaatgtgaatctgaccatttctgaaggtcgttatcatcaagtaaaacgtatgtttgccgcacttgggaataaagtcgttggattacatcgctggaaaattggtgatgtagtgttggatgaatccttagaagaaggcgaataccgctcattaactcaaagtgaaattgaaaagttagtaaaataa

SEQ ID NO: 2620 - protein, 232 aa, Haemophilus influenzae
MRLDKFIAENVGLTRSQATKAIHQSAVKINGEIVKSGSVQISQEDEIYFEDELLTWVEEGQYFMLHKPQGCVCSNDDGDYPTIYQFFDYPLAGKLHSAGRLDVDTTGLVLLTDDGQWSHRITSPKHHCEKTYLVTLADPVEENYAAACSEGILLRGEKEPTKPAKLEILDDYNVNLTISEGRYHQVKRMFAALGNKVVGLHRWKIGDVVLDESLEEGEYRSLTQSEIEKLVK

SEQ ID NO: 2621 - DNA, 528 bp, Haemophilus influenzae
atgactgtcatttctgccaattgcgtgggggcttttatcttacatgatttgcaccagccgtttaattccccttttgtgaatctctgtctcttgccacaggattttttgcgttatttacaaaatatggatttctaccgtactcaacctctcacatttgtacaaacagaaaaaagttatccagtgggaaaacttgctgatcttgaaattcattttatacattatcacagtgagcaagaagccaatgaaaaatggcaacttcgcacgtcacgaatgaatttcgataatctttttattatgatgacagatcgagacggcgtgaccgaaaaagacattcaactttttgatcaactccctttcaaaaataaagtgatttttactcacaagccctgccctgcttttaaatcggcttattatataaaaggcttcgagaaacaaaatcaggtgggcgatatttttgaattttcaggctggaatgggaaaaaatattacgatcaattcgattacgtgaagtggcttaatcaagcttaa

SEQ ID NO: 2622 - protein, 175 aa, Haemophilus influenzae
MTVISANCVGAFILHDLHQPFNSPFVNLCLLPQDFLRYLQNMDFYRTQPLTFVQTEKSYPVGKLADLEIHFIHYHSEQEANEKWQLRTSRMNFDNLFIMMTDRDGVTEKDIQLFDQLPFKNKVIFTHKPCPAFKSAYYIKGFEKQNQVGDIFEFSGWNGKKYYDQFDYVKWLNQA

SEQ ID NO: 2623 - DNA, 141 bp, Haemophilus influenzae
ttgcagagtgcgattaatgaaaaatctttggcatttattcaccgcacttttaattttttgaaatggattcattttctcatcctttatgcttttgttgcgaaaatcctaccttttttgctgaaaaatgaaaagtctagctaa

SEQ ID NO: 2624 - protein, 46 aa, Haemophilus influenzae
MQSAINEKSLAFIHRTFNFLKWIHFLILYAFVAKILPFLLKNEKSS

SEQ ID NO: 2625 - DNA, 2271 bp, Haemophilus influenzae
atgaccgaacaattacgtcaagcagccttagatttccacgaatttccaattcctggaaaaatcgaagttaccccaacaaaatcactcgcaacacaacgcgatcttgctttagcttattcaccaggtgtggcagagccttgtttagaaattgaaaaagatcctgccgcctcttacaaatatacagcacgtggcaatttggtggcggtgatttccaatggtacagcggtacttggacttggcaatattggcgcgcttgccggcaaacccgtaatggaagggaagggcgtattgttcaaaaaatttgcgggcatcaacgtatttgatattgaagtgaatgagcatgatcccgataaacttgtggatattattgcctcgttagagccaactttcggtggagtgaacttagaagatattaaagcaccagaatgtttctatatcgaacaaaaattgcgtgagagaatgaacattcctgtattccatgatgaccagcatggtacggcgatcattagcgctgctgcgattatcaattctcttcgtattgtaggtaaaaaaattgaagatgtccgacttgttgcttctggtgcgggtgcagcatctattgcgtgtttgaacttattactttctttaggcatgaaacgtgaaaatatcacagtttgcgactccaaaggcgtggtatataaaggccgtgatgacaaaatggatcaaaccaaaaaagagtatgcaattgaagataatggctggcgtaaacttggtgatgcgatgccaaatgcagatattttcttaggttgttcggcggcaggtgcgcttacacaagatatggttaaaagtatggctgcgcatccaattattcttgctttagctaatccaaatcctgaaattaccccgccagaagcaaaagcagttcgtcctgatgcgattgtatgtacaggccgctctgattatccaaaccaagtaaataacgtgctttgtttcccatttattttccgtggtgcattagatgtgggcgcaaccactattaatgaagaaatgaaacgtgcggcagtttatgccattgctgaccttgcattagaagagcaaaacgaagttgtaacctctgcttacggtggcgaaggggcaacatttggtgcggattatgtgattcctcgtccatttgatcctcgcttgattgtgcgtattgcaccagcggtagcaaaagctgcaatggaatctggtgtggcaactcgtccaattcaaaattgggatgcttatgttgaaaaactcactcagtttgtttacaaaacgagcttgtttatgcgtcctattttcagccaagcaaaatcggcaaaacaacgcattattttagcggaaggggaagaaaataaagcattacatgccacccaagaagtgatttcaatgggcttggcaaatccaattttaattggtcgccgcagtgtgattgaagaaaaaattaaaaaacttggtttacgtttaactgcaggtgtagattttgaaattgtggataacgaagataatcctcgctatgaagaatgttggaaacactattacgaacttactaaacgtaaaggcattacacctgcaatcgcaaaacgtgtcgtgcgttctaacactaccgtattagcttctacattgcttagcttaggttatgcagacgctttagtatgtggtttatttggttcatacggaaaacaccttgcctctattcgagatattattggcttaaaagacggcgtgaaaactgccgctgctttaaatagtcttgtattaccgacgggtaacgtattcttaacagatactcacgtaaacagtaatcctacagcagaagaattagctgaaattaccttaatggcagcagaagaaattcatcgttttggtattgaacctgcagttgcgttgctttcacactctaattttggttcatctgattcattaggcgcaccaaaaatgcgcgaagtattacagatcgtcaaagtgcgcaatccacatttaatgattgatggggaaatgcgtggcgatttagcgatgaatgaagcacacagaaaagaattaatgcctgatagcccattgaaaggaagcgcaaatttattagtgttccctgatttgagtgcatcacgtattagttatagcttattacgcggcaccactacggcaattactgttggcccgatcttaatgggtatgaataaatctgcgcatattcttaatccaggtgcatctgttcgtcgtattatcaatatgattgcctatgcagcagtgaaagcacaacaagagtaa

SEQ ID NO: 2626 - protein, 756 aa, Haemophilus influenzae
MTEQLRQAALDFHEFPIPGKIEVTPTKSLATQRDLALAYSPGVAEPCLEIEKDPAASYKYTARGNLVAVISNGTAVLGLGNIGALAGKPVMEGKGVLFKKFAGINVFDIEVNEHDPDKLVDIIASLEPTFGGVNLEDIKAPECFYIEQKLRERMNIPVFHDDQHGTAIISAAAIINSLRIVGKKIEDVRLVASGAGAASIACLNLLLSLGMKRENITVCDSKGVVYKGRDDKMDQTKKEYAIEDNGWRKLGDAMPNADIFLGCSAAGALTQDMVKSMAAHPIILALANPNPEITPPEAKAVRPDAIVCTGRSDYPNQVNNVLCFPFIFRGALDVGATTINEEMKRAAVYAIADLALEEQNEVVTSAYGGEGATFGADYVIPRPFDPRLIVRIAPAVAKAAMESGVATRPIQNWDAYVEKLTQFVYKTSLFMRPIFSQAKSAKQRIILAEGEENKALHATQEVISMGLANPILIGRRSVIEEKIKKLGLRLTAGVDFEIVDNEDNPRYEECWKHYYELTKRKGITPAIAKRVVRSNTTVLASTLLSLGYADALVCGLFGSYGKHLASIRDIIGLKDGVKTAAALNSLVLPTGNVFLTDTHVNSNPTAEELAEITLMAAEEIHRFGIEPAVALLSHSNFGSSDSLGAPKMREVLQIVKVRNPHLMIDGEMRGDLAMNEAHRKELMPDSPLKGSANLLVFPDLSASRISYSLLRGTTTAITVGPILMGMNKSAHILNPGASVRRIINMIAYAAVKAQQE

SEQ ID NO: 2627 - DNA, 1926 bp, Haemophilus influenzae
atgaaaaaagcacattcccctttattccccatcttcacattcgtgttgattaatctcattatcctttccttatcccgtttgggacttgctgtatggcaatcagagcgtgtatccgccgtagatggctggttgcaattatttttgcaaggcgtacgaatggatgttgtggcactttgttatttatttggcgtaccagcattgctcacaacattgttccatagcagtaaagtttgggtaaaaattttacgcctatggctaacctttggtagcgtgttcattatctttatggaaattgccacacctgcctttattgaaacctacgattaccgcccaaatcgtttatttatcgaatacttaatttatccgaaagaagttttttcaatgcttgcggaaggacatttaagtgcggtaatttttagccttgttttcacgattttagctgccgtgatttattggaaaatttctggttgggcagtcaaaaatttacgttcaatgagttggaaacttcgccctgtgattgctttgcttgtgattgtcgtgagcttccttggggcacgttcaagttttcaacaccgtggtataaatcctgctatggtggcattttcttctgatgcgttagtgaattctctggtgcttaattcgggctattccgtcatttatgcggcacagcaatttaaagatgaagaaaaatcttcagaaatgtacggaaaaatggatgcagatgaaatgtttcgtattgttaaagctagccgtggccgtccagagagtgattacatttcagataaatacccaactttaacgaaaaatgtcgcgacttatcagggtaaacctaaaaatatcgtgattttgctacaagaaagtctcggtgctcagtttattggaacactcggtggcaaaccactttctccaaatgtggatcagctcgcaaaagaagggtggttatttgaaaatctttatgcaacaggcacgcgttcagtacgtggtattgaagcaacaaccgcaggttttacgccaacaccagctcgtgcagtggtgaaacttaataatgcccaaagtggtttctttactattgcggatttattacataaacaaggctataacacttcctttatttatggtggcgaaaagcacttcgacaatatggcgagctttttctacggtaatggctttaaagatatttgggatcaacaagactatcagaatccaaaatttactggcacttggggcgtgagtgatgaggatttatttgataaagccaatgaaactttcacgaaattacaaaatgaaggtaaaccgttttttagtttagtatttagctcaagcaatcacgatccatttgaatatccagatggcaagattgagctttatgagcaaccaaaagccactcgtaataacgcagcaaaatatgcggattatgccttaggtcatttctttaaaatggcaaaacagtctaattattggaaagatacgattttcttaattgttgcggatcacgattctcgtgtaggcggagcaagtcttgtgccgattaagcatttccatattccagccttgattcttggtgatggcattacgccacgccgtgatagccgtcttgtgagccaaattgatatgccaactacattgctttctttagcaggcgtaagtggcaattatccaatgattggttttgatttaacgcaagatgtaaacccagatcgtgcttttatgcaatacgatcaaactcaagcaatgatgaaaggcaataatgatgtggtaattcaaatgccaaataaagcagcacaaggttattattatgataaatcaacagaaactttaacgccaaaagaggtgcctgatgcaatgaaaaaagaggcattggctcacgctttattaggtagttatttgtataaaaatcgcttgtattcttcaggtgaaaataaatag

SEQ ID NO: 2628 - protein, 641 aa, Haemophilus influenzae
MKKAHSPLFPIFTFVLINLIILSLSRLGLAVWQSERVSAVDGWLQLFLQGVRMDVVALCYLFGVPALLTTLFHSSKVWVKILRLWLTFGSVFIIFMEIATPAFIETYDYRPNRLFIEYLIYPKEVFSMLAEGHLSAVIFSLVFTILAAVIYWKISGWAVKNLRSMSWKLRPVIALLVIVVSFLGARSSFQHRGINPAMVAFSSDALVNSLVLNSGYSVIYAAQQFKDEEKSSEMYGKMDADEMFRIVKASRGRPESDYISDKYPTLTKNVATYQGKPKNIVILLQESLGAQFIGTLGGKPLSPNVDQLAKEGWLFENLYATGTRSVRGIEATTAGFTPTPARAVVKLNNAQSGFFTIADLLHKQGYNTSFIYGGEKHFDNMASFFYGNGFKDIWDQQDYQNPKFTGTWGVSDEDLFDKANETFTKLQNEGKPFFSLVFSSSNHDPFEYPDGKIELYEQPKATRNNAAKYADYALGHFFKMAKQSNYWKDTIFLIVADHDSRVGGASLVPIKHFHIPALILGDGITPRRDSRLVSQIDMPTTLLSLAGVSGNYPMIGFDLTQDVNPDRAFMQYDQTQAMMKGNNDVVIQMPNKAAQGYYYDKSTETLTPKEVPDAMKKEALAHALLGSYLYKNRLYSSGENK

SEQ ID NO: 2629 - DNA, 1299 bp, Haemophilus influenzae
  misc_feature 4, 5, 6, 7, 8: n is any nucleotide
atgnnnnntaaaactcactatgtgacgccaagagaacgtattttagatgctatagaaaacatcaaaaaagaactggtatcacgccgtgaatacttcattaaagaacataaacttttagaagaacagcgtatcagccaacgaacccaatttgatattgaaatgatgaatgaattgggctattgctcgggaattgaaaactactctcgctatttatcgggaagaaatgagggcgaaccaccaccaacattatttgattatatgccctctgatgcgattttaattattgatgaatctcatgtaactgtgcctcaaattggcgggatgtatcgtggcgaccgttcacgtaaagaaaccttagtcgaatatggtttccgtttgccatccgccttggataatcgcccgttacgctttgaggaatttgaacgcttagccccacaaaccatctatgtttccgcaacaccagggccttatgaattagagaaatcaggtagtgaaatcatcgatcaagtggttcgcccgactggtttacttgatccgctcattgaaattcgtccagtctcaattcaagtggatgatttactttccgaagctcgccaaagagcggataaaaatgagcgcgttttagtgacaacacttaccaagaaaatggcggaagatttaacagattatttggatgaacacgggattcgtgtgcgttatctacattctgatattgataccgtggaacgtgtcgaaattatccgagatttgcgtttaggcgaatttgatgtattggttggaattaacttattgcgtgaaggtttagatattccagaagtgtctcttgtggcgattttagatgctgacaaagaaggatttttacgttctgaacgttctttaatccaaaccatcggtcgtgctgcacgaaacttaaatggtaaagcgattttatatgcggatagcatcacaaaatccatggaaaaagccatcaccgaaaccaatcgtcgtcgtgaaaaacaaacaaaatacaatgaagaacacggcattgtgccacaagcattaaataagaaagtcggcgaattgttagatattgggcaaggtgcaaaccaaaaagcgaaagccaataaacaacgtggaaaaatggctgcagaaccaaccgcactttataatgcaccgaaaaatgccaaagaatatcaacaacaaatcaaaaaattggaacaacaaatgtataaatttgcgcaagatttggaatttgaaaaagccgcggctattcgcgatcaattacatcaattgcgtgaacagtttgtttttgataactaa

SEQ ID NO: 2630 - protein, 432 aa, Haemophilus influenzae
  VARIANT 2, 3: Xaa is any amino acid
MXXKTHYVTPRERILDAIENIKKELVSRREYFIKEHKLLEEQRISQRTQFDIEMMNELGYCSGIENYSRYLSGRNEGEPPPTLFDYMPSDAILIIDESHVTVPQIGGMYRGDRSRKETLVEYGFRLPSALDNRPLRFEEFERLAPQTIYVSATPGPYELEKSGSEIIDQVVRPTGLLDPLIEIRPVSIQVDDLLSEARQRADKNERVLVTTLTKKMAEDLTDYLDEHGIRVRYLHSDIDTVERVEIIRDLRLGEFDVLVGINLLREGLDIPEVSLVAILDADKEGFLRSERSLIQTIGRAARNLNGKAILYADSITKSMEKAITETNRRREKQTKYNEEHGIVPQALNKKVGELLDIGQGANQKAKANKQRGKMAAEPTALYNAPKNAKEYQQQIKKLEQQMYKFAQDLEFEKAAAIRDQLHQLREQFVFDN

SEQ ID NO: 2631 - DNA, 780 bp, Haemophilus influenzae
  misc_feature 758, 759, 760, 761, 762: n is any nucleotide
atgaaaaaatataaaactgggctcgtgttattagtgattgcactcgccttacttgcctatttttccccttggtttttcttacatattgctgcatggcaaaaagagtttaatcagcttatttcggaaaatttacatcaaattcaaaataatagcatcaaggcaggcatcacacttattttcgccagctttatttatggcgtactccatgccctcgggccaggacacggcaaatttattatcgccagctatctttccacccacgaaagccaattaaaacaaagcactatcttgagcttactttcatccttaatgcaaggcattgtcgcgattacagcaacaacattgcttgttgtagtgctaaatctttcatcacgttatttcaaattaagccagctttggttagaacgaactgccttgctattattggtatttctcggctgttattggatttggcaaggtttacgtgcctatcgtaaaaaagctaaattagccattaaatccctcaatcccctccctctacacgaaaaaagtgcggtgaaaaataaccgcacttttcagccaaacacctgtagctgtggacaccaacatttgccaagccccacacaaactgcacaagcaaccaatctaaaatcacaattcctcgtgattctaacaattggcatgcgcccmygtagcggtgcgattttcgttttatttttagcttatatgcttgatctttatagctggggaattttagctgtattagccatgtcttttcnnnnncattcattcattaattaa

SEQ ID NO: 2632 - protein, 259 aa, Haemophilus influenzae
  VARIANT 224, 253, 254: Xaa is any amino acid
MKKYKTGLVLLVIALALLAYFSPWFFLHIAAWQKEFNQLISENLHQIQNNSIKAGITLIFASFIYGVLHALGPGHGKFIIASYLSTHESQLKQSTILSLLSSLMQGIVAITATTLLVVVLNLSSRYFKLSQLWLERTALLLLVFLGCYWIWQGLRAYRKKAKLAIKSLNPLPLHEKSAVKNNRTFQPNTCSCGHQHLPSPTQTAQATNLKSQFLVILTIGMRPXSGAIFVLFLAYMLDLYSWGILAVLAMSFXXHSFIN

SEQ ID NO: 2633 - DNA, 621 bp, Haemophilus influenzae
gtgaaaacgtattcattattactcggtttattcgttagttttggtgttttagcccatcctcacgcatttattgatatacaaaccacgcccattatagaaaataatcaactcacaggtttttcaatgaaatggacgttggatgaaccaagttcgtctgcagttatttatgatatgaaacaagctagaactaaatcggaaaaacaaaaacttcttgatgatgtgatgggaaatatcgtcagtgagcattatttcagctatctatatgatgctcagaataataaaatcaaatattcccctcgcccaaaaaattacggcattaatgttcaaggcttacaactgcaatattattttgatgtgccactcgcccatccgcaaaagttagaaaaaaacacatttagcttacaaacttacgatcccacttattatgtggcgatgacttacgcttcaaaaagtgcggtagatttttccgcactttcgaaaaattgccaaggaaaattaattgaacctaatgtggatgaaaaaatccaagcctacgcatcttcacttgataaatcccaaaagaacgaagatgattccttaggcgtaatgttcgcgcaaaaaataataattcaatgtgagtag

SEQ ID NO: 2634 - protein, 206 aa, Haemophilus influenzae
MKTYSLLLGLFVSFGVLAHPHAFIDIQTTPIIENNQLTGFSMKWTLDEPSSSAVIYDMKQARTKSEKQKLLDDVMGNIVSEHYFSYLYDAQNNKIKYSPRPKNYGINVQGLQLQYYFDVPLAHPQKLEKNTFSLQTYDPTYYVAMTYASKSAVDFSALSKNCQGKLIEPNVDEKIQAYASSLDKSQKNEDDSLGVMFAQKIIIQCE

SEQ ID NO: 2635 - DNA, 306 bp, Haemophilus influenzae
atgtttaatttaaagcgtgagcattttagagatgattatctttataggttttatcaatatggtgatactcatagtaagattccttctaatttgtataaagtattggcaagaaaattagatatgataagtgcctcagaaaatatcaacgatttacgttctccaccagctaaccatttggagttgcttgagccaaaagaaaataaaatttattctattcgagtgaataaacaatatcgtttaatttttaaatatgaaaataacgaagtaaataatttatatttagatccacattcttataatttgtaa

SEQ ID NO: 2636 - protein, 101 aa, Haemophilus influenzae
MFNLKREHFRDDYLYRFYQYGDTHSKIPSNLYKVLARKLDMISASENINDLRSPPANHLELLEPKENKIYSIRVNKQYRLIFKYENNEVNNLYLDPHSYNL

SEQ ID NO: 2637 - DNA, 324 bp, Haemophilus influenzae
atgatgacgagaaaacccacctctgttggtgaaattctacaagaagagtttttagaacctttaagtcttaaaattagtgatttagctcaaattttagatgtacatcgtaatacggcaagcaatattgttaataatagttcacgaattacgctagaaatggcagttaaacttgctaaagtatttgatactacgcctgagttttggcttaatctgcaaacacgtattgatttatgggaccttgaacacaataaacgttttcaacaaagtcttgcaaatgttaagcccgctctacatcggcatgatacttctacatttgcaatgtaa

SEQ ID NO: 2638 - protein, 107 aa, Haemophilus influenzae
MMTRKPTSVGEILQEEFLEPLSLKISDLAQILDVHRNTASNIVNNSSRITLEMAVKLAKVFDTTPEFWLNLQTRIDLWDLEHNKRFQQSLANVKPALHRHDTSTFAM

SEQ ID NO: 2639 - DNA, 1671 bp, Haemophilus influenzae
atgtcatctcaatttgtgtatacgatgcatcgtgtcggcaaagtagtgccgccgaagcgtcatattttgaaagatatttctttaagctttttccctggtgctaagatcggggttttaggtttaaatggtgcgggtaaatcgactcttttacgcattatggcaggcgtagataaagagtttgaaggggaagctcgtccacaaccgggtattaaaattgggtatcttccgcaagagccaaaactcgagccacaacaaaccgtgcgtgaagcagtggaagaagcggtttctgaagtgaaaaatgcactgactcgtttagatgaagtgtatgcgctttatgcggatcctgatgcagattttgataaattagcggcagaacaagccaatcttgaagctatcattcaagcgcatgatgggcataatttagataaccaattagagcgtgcggcagatgcgttacgtttacctgattgggatgccaaaattgaacatttatctggtggtgagcgtcgccgagtggcactttgccgcttattactcgaaaaaccagatatgttgttgttagatgaaccaactaaccacttagatgcggaatctgtggcgtggttagagcgattcttacacgactacgagggtacagtggtagcaatcactcacgaccgttatttcttagataatgtggctggttggatcttagagcttgaccgtggcgagggcattccttgggaaggcaactattcttcttggttagagcaaaaagagaaacgtttagaacaagaacaagcaactgaaaacgcacgtcaaaaatccattgcgaaagagttagaatgggttcgtcaaaatccaaaaggtcgccaagcgaaaagcaaagcacgtatggctcgttttgatgaattgaactctggcgaatatcaaaaacgaaacgagacgaacgaactctttattccacctggcccacgcttaggcgataaagtgattgaagtgcaaaacttaaccaagtcttatggcgaccgcactttaattgatgatttatcattcagtattccaaaaggggcaattgttgggattatcggagcgaacggtgcaggtaaatcaaccttattccgtatgttgtcaggtcaagaacaaccagattcaggttctgtgacaatgggcgaaaccgttgtgcttgcttcggtagatcagttccgtgactcaatggatgacaagaaaactgtgtgggaagaagtgtctaatggacaagacattcttactatcggcaactttgaaattccaagccgtgcttatgtggggcgtttcaacttcaaaggtgtagatcaacaaaaacgtgtgggggaattatcgggcggtgaacgtggtcgtttacacttagcgaaacttctacaacgtggtggtaacgtgctattactggacgaaccaaccaatgacttagatgttgaaaccttgcgtgccttagaaaatgcgatcttagaattcccaggctgtgcaatggttatttcgcacgaccgttggttcttagaccgtatcgcaacgcatattttagactacggcgatgaaggtaaagtcacgttctatgaaggtaacttctcagactacgaagagtggaaaaagaaaaccttaggcgatgcagccactcagccacatcgtattaaatataaacgtattgcgaagtaa

SEQ ID NO: 2640 - protein, 556 aa, Haemophilus influenzae
MSSQFVYTMHRVGKVVPPKRHILKDISLSFFPGAKIGVLGLNGAGKSTLLRIMAGVDKEFEGEARPQPGIKIGYLPQEPKLEPQQTVREAVEEAVSEVKNALTRLDEVYALYADPDADFDKLAAEQANLEAIIQAHDGHNLDNQLERAADALRLPDWDAKIEHLSGGERRRVALCRLLLEKPDMLLLDEPTNHLDAESVAWLERFLHDYEGTVVAITHDRYFLDNVAGWILELDRGEGIPWEGNYSSWLEQKEKRLEQEQATENARQKSIAKELEWVRQNPKGRQAKSKARMARFDELNSGEYQKRNETNELFIPPGPRLGDKVIEVQNLTKSYGDRTLIDDLSFSIPKGAIVGIIGANGAGKSTLFRMLSGQEQPDSGSVTMGETVVLASVDQFRDSMDDKKTVWEEVSNGQDILTIGNFEIPSRAYVGRFNFKGVDQQKRVGELSGGERGRLHLAKLLQRGGNVLLLDEPTNDLDVETLRALENAILEFPGCAMVISHDRWFLDRIATHILDYGDEGKVTFYEGNFSDYEEWKKKTLGDAATQPHRIKYKRIAK

SEQ ID NO: 2641 - DNA, 342 bp, Haemophilus influenzae
atgttagttgatttacatatttttttcgcctttttaagtttggcattgttagtaattcgtggtgcaatgcagcttaatggtaaaaattggcgttcgataaaattattaaaaattttaccgcacttatcagataccttgctgattgtgtctggcgtcgtcattttatacctctttgcttttggtattgaatggtggttagtggctaaattcgcattactgattttgtatattgtgtttgctgcaaaatttttcagtaaaaaagtttctcaacccaaaagcattttcttttggcttgcttgcgtaagttttattggtgcgatgttaattgcctatttaaaataa

SEQ ID NO: 2642 - protein, 113 aa, Haemophilus influenzae
MLVDLHIFFAFLSLALLVIRGAMQLNGKNWRSIKLLKILPHLSDTLLIVSGVVILYLFAFGIEWWLVAKFALLILYIVFAAKFFSKKVSQPKSIFFWLACVSFIGAMLIAYLK

SEQ ID NO: 2643 - DNA, 1863 bp, Haemophilus influenzae
ttgcttggacaagaatttgaacatatcttatttgatgcgcgaaatggcattcatcttgaagcgctggctattgcagctggaacactgaaaatgggcggcacactttgtttagtgttatctgattgggaaaatttatctcagcagcctgatcaagatagtttacgttggaatggaaatcagtcagcaatcgccacgcctaattttattgatcatttcaaacagtgcattgaacgttatcatttccccattttaagagaggaaagtgcggttgaatttcctacggttttttattctaacgaacatcacaaaaatgctacgttagcgcaacaacaaattatcgagactattttacaagccgagcaggatatttattttctaacctccaagcggggaagaggaaaatccgcattattgggtatgcttgctaaccaaattcaagcaccagtttatctcaccgcaccgaataaaagtgcggtgcattccgttattgaattttcagaacgagagatagaatttatcgcgcctgatgaactggctattcggttacaacatgaaccagaattcagtcaatcagcttggttgctggtagatgaagcggcggtaatcccattgccgttattgcaagaatattctcaatattttcaacatattgtcttcagcacaacaattcatagctatgaaggtacggggcgtggtttcgaattaaaatttaaacggaaaattcaccgcacttttcagcattttgagcttaaacagcccctacgttggcaagaaaatgacccgttagaacattttattgatgatcttttgttgctaaatgccgaagatgattttcagcactttgactataacaatattacttataacatagaggaaaacgctaaaaatctttccttcccctgcttgcgggggaaggtgcccgaagggcggaagggggatttagatatagccagcctccctcaagctttggaagctcccctcacaagtaagggtagtaaaggaaaatataatcgtcaatttttatttcgagatttttatggcttaatgacattggcgcattatcgaacatcgccactcgatcttcgccgtttacttgatggagaaaatcaacgtttttattttgccgaatatcaacagaatttgctcggtgcaatttgggcattagaagaaggaaatatggctgatgatgagttgattattcaaattcaacaaggcaaacgccgcccgaaagggaatcttgttccacaggcgttatgtttctatgaaaacttgcctcaagcctgtaaattacgatctttacgtatttctcgtatagcggttcagccaaattggcagcaaaagggcattgggcaaaatttgatgcaagccatggaaaatgccgatgtggattttctttcagtgagttttggctacaccgacgaactggcaaaattttggcaaaagtgcggttttgttttggtgcatttaggcgagcatcaagaagcgagtagtggttgttattcagcgattgcccttaaaggactttccaaagaaggcttggctttagttgatactgcgtacaaacaatttcagcgtaatctccctttatcttttcatccgtttgccataaattttgagcaaaatcagcttgattggcagcttgatgattttgattggatgagcttaaaaaacttcgctaattttcaccgcactttattttcgagcgttcctgcgatgaggcgtttattaaaattagcgggcaaagaaaatttcccattaatttccgcttatttaacaaaaaaacaacttcctattaacaagaaaaaaggcgtagaatgtttgcgtttagaaattaaacaatatttagagcgaggaactttatga

SEQ ID NO: 2644 - protein, 620 aa, Haemophilus influenzae
MLGQEFEHILFDARNGIHLEALAIAAGTLKMGGTLCLVLSDWENLSQQPDQDSLRWNGNQSAIATPNFIDHFKQCIERYHFPILREESAVEFPTVFYSNEHHKNATLAQQQIIETILQAEQDIYFLTSKRGRGKSALLGMLANQIQAPVYLTAPNKSAVHSVIEFSEREIEFIAPDELAIRLQHEPEFSQSAWLLVDEAAVIPLPLLQEYSQYFQHIVFSTTIHSYEGTGRGFELKFKRKIHRTFQHFELKQPLRWQENDPLEHFIDDLLLLNAEDDFQHFDYNNITYNIEENAKNLSFPCLRGKVPEGRKGDLDIASLPQALEAPLTSKGSKGKYNRQFLFRDFYGLMTLAHYRTSPLDLRRLLDGENQRFYFAEYQQNLLGAIWALEEGNMADDELIIQIQQGKRRPKGNLVPQALCFYENLPQACKLRSLRISRIAVQPNWQQKGIGQNLMQAMENADVDFLSVSFGYTDELAKFWQKCGFVLVHLGEHQEASSGCYSAIALKGLSKEGLALVDTAYKQFQRNLPLSFHPFAINFEQNQLDWQLDDFDWMSLKNFANFHRTLFSSVPAMRRLLKLAGKENFPLISAYLTKKQLPINKKKGVECLRLEIKQYLERGTL

SEQ ID NO: 2645 - DNA, 174 bp, Haemophilus influenzae
atgacagaacaaaccgcaaaaccaaaaggctggtttaaacgcgcacttgaaaaatatgacaacttcattaaagaatggggtttagatcaaccgaattgtagctgcgtgcctatgtcagcaacagaagatgaaaatggtaatttgaagacaaaagaatcttctttaaagaaataa

SEQ ID NO: 2646 - protein, 57 aa, Haemophilus influenzae
MTEQTAKPKGWFKRALEKYDNFIKEWGLDQPNCSCVPMSATEDENGNLKTKESSLKK

SEQ ID NO: 2647 - DNA, 3354 bp, Haemophilus influenzae
ttggcgattagtgaaattgcagagcaaaaccaaaatttaaccgtagtggtgactccagatacacgaagtgcggtgcgtttatcacgtgttttatcggaattaagcagtcaaaatgtatgccttttccctgattgggaaaccttaccttacgatactttttctccccatcaagaaattatttcctctcgtttaagtgcgcttttccatttacaaaatgcgaaaaaaggcattttcttattgccgatttcgacattaatgcaacgcctttgcccgccacaatatttacaacacaatgtgcttctgattaaaaaaggcgatcgtttggtcatcgataaaatgtgcttacaattagaagcagcgggctatcgagctgtggagcaagtattagaacacggcgagtacgcagttcgtggttccttgttggatcttttcccaatgggaagtgcggtgccttttcgccttgatttttttgatgatgaaattgattctattcgcacttttgatgtggatacgcaacgcactcttgatgaaattaactcaattaatcttttgccagctcacgaatttccaacggacgacaaagggattgaatttttccgtgcgcaatttcgtgaaacttttggggagattcgccgagatcccgaacatatttatcagcaaatcagtaaaggtaccttgatttctggcattgaatattggcagccacttttctttgctgaaatggcaactttatttgattatttgccggagcaaacgctgtttgtagatatggaaaataatcaaacgcaaggcgagcgtttttatcaagatgccaaacagcgttatgaacaacgtaaagtggatccgatgcgtccgcttttatcgcctgaaaaattatggcttaatgtagatgaagtcaatcgccgattgaaatcttatccacgtattacatttaaagcggaaaaagtgcggtcatcggtacgccagaaaaatttacctgttgccgctctaccagaagtgactattcaatcccagcaaaaagaaccattgggacaattacgtcaattgattgagcattttaaaggaaatgtactgttttctgtggagacggaaggtcgccgagagactttgcttgatttgctttcaccgttaaaactcaagccaaaacaaattcaatctttagaacagattgaaaatgaaaaatttagcttgttagtcagctctcttgaacaaggttttataattgaacaatcgcttcctgttgcgattattggcgaagctaatttacttggcgagcgcattcaacaacgttctagagacaaacgtaaaacaattaatcctgatacgcttgtacgaaatcttgccgaactgaaaatagggcaaccagttgtgcatcttgatcacggtgtgggacgttatggcggtttggtcaccttagatacaggcggcattaaagccgaatatttgctactaaattatgcaaatgaatcgaaactttatgtgccagtgacttcattacatttgattagccgttatgttggtggctctgatgaaagtgcgccattacataaattagggaacgaggcttgggcgaaatcacgccaaaaagctgcggagaaaattcgtgatgtggcggcagagttattagatgtttacgcacaacgtgaagcgaagaaaggctttgcctttaaatatgatcgtgaagaatttcaacaattttccgcaacctttccttttgaagaaacctacgatcaggaaatggcaattaatgcggtaatttcggatatgtgtcagccaaaagcaatggatcgccttgtttgtggtgatgtgggttttggtaaaactgaagtggcaatgcgcgctgcctttttggctgtgatgaatcataagcaagtagcagtgctagtgccaaccacactgttagcccaacagcattatgagaattttaaagatcgttttgcgaatttgcctgtgaatgtcgaagtgttatcgcgtttcaaaactgcaaaagaacaaaaacaaattctggaaaaccttgcagaaggaaaagtcgatatattaattggtacccataaattaattcaatcagatgtaaaatttaacgatcttggattgttgattattgatgaagaacatcgttttggtgtagggcaaaaagagaaaatcaaacagcttcgtgcgaatatcgatattcttacgctaacggcaacgccaattcctcgaacgcttaatatggcgatgaatggcattcgtgatctttccattatttccacacctcctgctcgccgattaagtattaaaaccttcgtccgtcagaatgacgatcttgttgtacgagaagcgattttgcgtgaaattctccgaggtgggcaggtttattatctccacaatgatgtcgcaagcattgaaaatacagcagaaaaactgaccacgcttgtgccagaggcgcgagtaattgtggggcacggacaaatgagagaacgtgagttagaacgtgtgatgagtgatttttatcatcagcgttataacgtcttagtttgttcaaccattatcgaaacgggtattgatgtaccaacggcaaataccattattattgaacgagcggatcattttggtttggctcagttgcatcaattacgtggacgagtcgggcgttcacatcatcaggcttatgcttatttgcttacgcccccacctaaaatgatgacaaaagatgctgaacgccgtctagatgcgttggaaaatcttgataatcttggggctggttttatcttggcaacccacgatttagagattcgtggtgctggcgaattacttggaaacgaacaaagtggacaaattgaaagcatcggtttttcactttatatggaattattggatgcagcggttaaagcgttaaaagaagggcgtgaaccatcattagaagaattgacgcaacaacaagcggatattgaattgcgtgtgccagctttactgcctgatgattatctaggagacgtgaatatgcgtttatccttttataaacgcattgctgcagcagagagtaaagcagaattagatgaattaaaagttgagttgattgacagatttggattattgcctgatgcaacgaaaaatttattacaaattacagagttgcgtttattggttgagccgttgaacgttgtgcgaattgatgctggaacacaaggcggttttattgagttttcagcaaaagcacaagtgaatccagataaatttattcaattaattcaaaaagaacctattgtgtatcgatttgatggcccattcaaatttaagtttatgaaagatctatccgataacaaagtgcggttagaatttgtggtggatttgttaagaacgattgctgcataa

SEQ ID NO: 2648 - protein, 1117 aa, Haemophilus influenzae
MAISEIAEQNQNLTVVVTPDTRSAVRLSRVLSELSSQNVCLFPDWETLPYDTFSPHQEIISSRLSALFHLQNAKKGIFLLPISTLMQRLCPPQYLQHNVLLIKKGDRLVIDKMCLQLEAAGYRAVEQVLEHGEYAVRGSLLDLFPMGSAVPFRLDFFDDEIDSIRTFDVDTQRTLDEINSINLLPAHEFPTDDKGIEFFRAQFRETFGEIRRDPEHIYQQISKGTLISGIEYWQPLFFAEMATLFDYLPEQTLFVDMENNQTQGERFYQDAKQRYEQRKVDPMRPLLSPEKLWLNVDEVNRRLKSYPRITFKAEKVRSSVRQKNLPVAALPEVTIQSQQKEPLGQLRQLIEHFKGNVLFSVETEGRRETLLDLLSPLKLKPKQIQSLEQIENEKFSLLVSSLEQGFIIEQSLPVAIIGEANLLGERIQQRSRDKRKTINPDTLVRNLAELKIGQPVVHLDHGVGRYGGLVTLDTGGIKAEYLLLNYANESKLYVPVTSLHLISRYVGGSDESAPLHKLGNEAWAKSRQKAAEKIRDVAAELLDVYAQREAKKGFAFKYDREEFQQFSATFPFEETYDQEMAINAVISDMCQPKAMDRLVCGDVGFGKTEVAMRAAFLAVMNHKQVAVLVPTTLLAQQHYENFKDRFANLPVNVEVLSRFKTAKEQKQILENLAEGKVDILIGTHKLIQSDVKFNDLGLLIIDEEHRFGVGQKEKIKQLRANIDILTLTATPIPRTLNMAMNGIRDLSIISTPPARRLSIKTFVRQNDDLVVREAILREILRGGQVYYLHNDVASIENTAEKLTTLVPEARVIVGHGQMRERELERVMSDFYHQRYNVLVCSTIIETGIDVPTANTIIIERADHFGLAQLHQLRGRVGRSHHQAYAYLLTPPPKMMTKDAERRLDALENLDNLGAGFILATHDLEIRGAGELLGNEQSGQIESIGFSLYMELLDAAVKALKEGREPSLEELTQQQADIELRVPALLPDDYLGDVNMRLSFYKRIAAAESKAELDELKVELIDRFGLLPDATKNLLQITELRLLVEPLNVVRIDAGTQGGFIEFSAKAQVNPDKFIQLIQKEPIVYRFDGPFKFKFMKDLSDNKVRLEFVVDLLRTIAA

SEQ ID NO: 2649 - DNA, 1392 bp, Haemophilus influenzae
atgaaaaaaacacgttttgtattaaatagtattgcacttggattaagtgtattaagcacatcatttgttgctcaagccactttgccaagttttgtttcggaacaaaacagtcttgcaccgatgttagaaaaagtacaacctgccgttgtcactctttccgttgaaggaaaagctaaagtagattctcgttctcctttcctagacgatattcctgaagaatttaaattcttctttggcgatcgttttgccgaacaatttggtggacgtggagagtcaaagcgtaacttccgtggtttaggttctggtgtcattattaatgcaagcaaaggctatgttttaaccaataatcatgttattgatggagctgataaaattaccgtgcaattacaagatgggcgtgaatttaaagcaaaattagtgggtaaagatgaacaatcagatattgcattagtacagcttgaaaaaccaagtaatttaacagaaatcaaatttgctgattccgacaaattacgcgtaggcgatttcactgttgcaatcggtaatccatttggtttaggtcaaactgtgacatcaggtattgtttctgcattgggtcgttcaacaggttctgacagtggcacttatgaaaactatattcaaaccgatgcagcagtaaaccgcggtaattcgggtggtgcattagtcaatctaaatggcgaacttattggaattaataccgcaattatttctccaagcggtggcaatgcaggaattgcctttgcgattccaagtaatcaagcaagcaatttagtgcaacaaattttagaatttggtcaagtgcgtcgcggattgcttggtattaaagggggcgaactcaatgctgatttagccaaagcctttaatgtaagcgcgcaacaaggtgcatttgtaagtgaagttttaccgaaatctgctgctgaaaaagcaggacttaaagcgggcgatattatcacggcgatgaacggtcaaaaaatctcaagtttcgctgaaattcgtgcaaaaatcgcaaccactggtgcaggcaaagagattagcttgacttacttacgtgatggcaaatcccacgacgttaaaatgaaattacaagcggatgatggtagccaactttcctcaaaaactgagttgcctgcattagatggcgcaacattgaaagactacgatgctaaaggcgttaaaggaattgaaatcacaaaaattcaacctaattcgctggctgcacaacgtggtttaaaatcgggcgatattattattggtattaatcgtcaaatgatcgaaaacattcgtgaattaaataaagtgcttgaaactgaaccgtcagcagttgcacttaatattttacgaggtgacagtaatttctatttattagtgcaataa

SEQ ID NO: 2650 - protein, 463 aa, Haemophilus influenzae
MKKTRFVLNSIALGLSVLSTSFVAQATLPSFVSEQNSLAPMLEKVQPAVVTLSVEGKAKVDSRSPFLDDIPEEFKFFFGDRFAEQFGGRGESKRNFRGLGSGVIINASKGYVLTNNHVIDGADKITVQLQDGREFKAKLVGKDEQSDIALVQLEKPSNLTEIKFADSDKLRVGDFTVAIGNPFGLGQTVTSGIVSALGRSTGSDSGTYENYIQTDAAVNRGNSGGALVNLNGELIGINTAIISPSGGNAGIAFAIPSNQASNLVQQILEFGQVRRGLLGIKGGELNADLAKAFNVSAQQGAFVSEVLPKSAAEKAGLKAGDIITAMNGQKISSFAEIRAKIATTGAGKEISLTYLRDGKSHDVKMKLQADDGSQLSSKTELPALDGATLKDYDAKGVKGIEITKIQPNSLAAQRGLKSGDIIIGINRQMIENIRELNKVLETEPSAVALNILRGDSNFYLLVQ

SEQ ID NO: 2651 - DNA, 891 bp, Haemophilus influenzae
atgagctggattaaccgaatttttagtaaaagtccttcttcttccactcgaaaagccaatgtgccagaaggcgtatggacaaaatgtactgcttgtgaacaagtactttatagtgaagaactcaaacgtaatctgtatgtttgcccgaaatgtggtcatcatatgcgtattgatgcccgtgagcgtttattaaatttattggacgaagattcaagccaagaaattgcggcagatttagaaccaaaagatattttaaaattcaaagatttaaagaaatataaagatcgtatcaatgcggcacaaaaagaaacgggcgagaaagatgcgctaattactatgacaggtacactttatgatatgccaatcgttgtggctgcatcaaactttgcttttatgggcggttcaatgggttctgtagttggtgcaaaatttgttaaagcggctgaaaaagcaatagaaatgaattgtccatttgtgtgtttctctgcaagtggcggtgctcgtatgcaagaagcattattctctttaatgcaaatggcaaaaactagtgccgtacttgctcaaatgcgtgaaaaaggcgtgccgtttatttcggtattaacggatccaactttaggcggcgtatcagccagttttgcgatgttaggggatttaaatattgccgagccaaaagccttaattggttttgcagggccacgcgttattgaacaaactgtgcgtgaaaaattgccagaaggtttccaacgtagtgagtttctacttgagaaaggggcaattgatatgatcgtgaaacgttcagaaatgcgtcaaactttagcaagtgtactgagtaaattaacgaatcaaccttctccttttatggagcctgaactcatttcagaagatgaataa

SEQ ID NO: 2652 - protein, 296 aa, Haemophilus influenzae
MSWINRIFSKSPSSSTRKANVPEGVWTKCTACEQVLYSEELKRNLYVCPKCGHHMRIDARERLLNLLDEDSSQEIAADLEPKDILKFKDLKKYKDRINAAQKETGEKDALITMTGTLYDMPIVVAASNFAFMGGSMGSVVGAKFVKAAEKAIEMNCPFVCFSASGGARMQEALFSLMQMAKTSAVLAQMREKGVPFISVLTDPTLGGVSASFAMLGDLNIAEPKALIGFAGPRVIEQTVREKLPEGFQRSEFLLEKGAIDMIVKRSEMRQTLASVLSKLTNQPSPFMEPELISEDE

SEQ ID NO: 2653 - DNA, 1305 bp, Haemophilus influenzae
atgcaacttaaagccacttcgccactcgctgagtggctttcttatttagaaaaaagccattttaaacctattgatctcggtttagatcgtattcaatccgtggcagaaaaattggatttacttcatcccgccccttatgtgataactgtgggggggacgaatggtaaaggcacgacttgtcgcttgttagaaacgattctgcttaatcacggattacgtgtgggcgtgtattcttcgccccatttattgcgttataacgagcgagtacgcattcaaaatcaagatttacccgatgaagcacatactgcctcttttacttttattgatgaaaacaaaacagaatcgctgacttattttgaatttagcaccctttctgccttgcatttatttaagcaagcaaaattagatgtggtgattttagaagtggggttgggcggtcgtttagatgcgaccaatattgtggatagccatcttgctgtgattactagcatcgatattgatcacactgattttcttggggataccagagaggccatcgcttttgaaaaagcaggaattttccgcgaaaattgccctgtcgtgattggtgaacctaatgtgccacaaacaatgttagatcaggccgaaaaattacattgccaagttgctcgtcgtgatgtggattggttatttgagcaaaatgctgaaaattggcaatggcaaaataaaaaagtgcggttagaaaatttgccgttttgtcagattccattggcgaatgccgcaacggctctggctgccgttcaatatttaccttttgatatttcagaacagactttgcgaaaatctttgcaagaggtagaactggttggtcgttttcaagctataaaaacagataaacgtgaaaaattagcggattatcttggcgtaccagttgaaaccttgccaacaattatcgttgatgtagggcataatcctcacgctgcaaaatatttatctgaaaaattgaccgcacttaaacgtagcatcgagggcaaaatgattgccgtgtgtgggatgctcaaagacaaagatgcaaatggggtatttgagcatttaacacctattattgatgaatggcattgtgtaaccttaagcggctatcgcgggcagtcaggcgatgaattagcagagaaattgaaaagtcatttcccaaatattcaagctacatcagataattctgtcatggatggtgtgtgtacagcactcaaaagtgcggtaaaaaatgatgtggttttagtctttggatctttccataccgttgctgaattttgggctgtggtagaataa

SEQ ID NO: 2654 - protein, 434 aa, Haemophilus influenzae
MQLKATSPLAEWLSYLEKSHFKPIDLGLDRIQSVAEKLDLLHPAPYVITVGGTNGKGTTCRLLETILLNHGLRVGVYSSPHLLRYNERVRIQNQDLPDEAHTASFTFIDENKTESLTYFEFSTLSALHLFKQAKLDVVILEVGLGGRLDATNIVDSHLAVITSIDIDHTDFLGDTREAIAFEKAGIFRENCPVVIGEPNVPQTMLDQAEKLHCQVARRDVDWLFEQNAENWQWQNKKVRLENLPFCQIPLANAATALAAVQYLPFDISEQTLRKSLQEVELVGRFQAIKTDKREKLADYLGVPVETLPTIIVDVGHNPHAAKYLSEKLTALKRSIEGKMIAVCGMLKDKDANGVFEHLTPIIDEWHCVTLSGYRGQSGDELAEKLKSHFPNIQATSDNSVMDGVCTALKSAVKNDVVLVFGSFHTVAEFWAVVE

SEQ ID NO: 2655 - DNA, 228 bp, Haemophilus influenzae
atgtcaaaattaatgttgataacacagaaaaaaactattttaagcgtttatagcattcctggtgcatcaacacaaataggtcagcaattaacagggattcgtatttatagaaaagattcaaataaatctacacctatttttaatgctgaaaaagaactcacaattgatgtaaaagataaaacagagaaaaaaatagtcataaaggttaccaaggcaccgtgggtgtga

SEQ ID NO: 2656 - protein, 75 aa, Haemophilus influenzae
MSKLMLITQKKTILSVYSIPGASTQIGQQLTGIRIYRKDSNKSTPIFNAEKELTIDVKDKTEKKIVIKVTKAPWV

SEQ ID NO: 2657 - DNA, 735 bp, Haemophilus influenzae
atgcgattcacaaaatccatcaaattctccttgaagtgcggtcgatttttcattatgtttaccgctatgctagtaaaaaaattatctccaaaattcaccgcactttttcgcgcactactctacgcaatctttgcattgattatactttgcttgctagtggatcgaggcgtaagtttttatgttcgcgataaaatattcacaaatattgatgaactcccctttcgtccttatgcccttgtgcttggtacatcaaaatacaccgtcagcggaaaaccgaacgtttattacgatagtcgcttaaccgctgctaaaaacctaatcgaacaacaaaaagtgaattatcttttattaagtggcgacaaccgaactttgcaatataacgaaccaagagcaatgtttcgcgatttacgtaaaatgggcgtgccagaaactttaatgttccgtgattttgcaggttttcgcacccttgattctgttgttcgtgccgataaaattttccaagtgcaagcatttacgattgtcagccaaaaatttcattgcgaacgcgcgctattaattgcccaagcacataatattgatgccatttgctttgtggcaaaacagccagaattacatttttccacgcaaataagagaagtttttgcccgcataaaagcggtttttgacttgatattaggtgttgagccttattttttaggggaacctcagccattgccaaacagcaccacattataa

SEQ ID NO: 2658 - protein, 244 aa, Haemophilus influenzae
MRFTKSIKFSLKCGRFFIMFTAMLVKKLSPKFTALFRALLYAIFALIILCLLVDRGVSFYVRDKIFTNIDELPFRPYALVLGTSKYTVSGKPNVYYDSRLTAAKNLIEQQKVNYLLLSGDNRTLQYNEPRAMFRDLRKMGVPETLMFRDFAGFRTLDSVVRADKIFQVQAFTIVSQKFHCERALLIAQAHNIDAICFVAKQPELHFSTQIREVFARIKAVFDLILGVEPYFLGEPQPLPNSTTL

SEQ ID NO: 2659 - DNA, 1077 bp, Haemophilus influenzae
atgtctgtgcaaaatgtagtgctttttgacacacagcctttaactctgatgcttggcggcaaactttcccatattaatgtcgcgtatcaaacttatggcacactcaatgccgaaaaaaataatgcggtattaatttgccatgctttgactggcgatgctgagccttatttcgatgatggtcgagatggctggtggcagaattttatgggagcaggtttggcattggatacggatcgttatttttttattagctcaaacgtattaggtgggtgtaagggaacaactgggccttcatcaattaatccgcaaacgggtaaaccttatggtagccaatttcctaatattgttgtgcaagatattgttaaagtacaaaaagccttgcttgaacatcttggtattagccatttaaaagcgattattggtggatcttttggcggcatgcaagcgaatcaatgggcgattgattatcctgattttatggataatatcgtgaatctttgctcatccatttattttagtgctgaagccataggctttaaccatgttatgcgtcaagcggtaattaatgatcccaattttaacggcggcgattattatgaggggacaccgccagatcaagggttatctattgcgcgtatgctaggtatgctgacttaccgaaccgatttacaactagcgaaagcctttgggcgtgctacaaaatcagatggcagcttttggggcgattactttcaagtggaatcctatctttcttaccaaggcaaaaaatttttagaacgttttgatgccaatagttatttgcatttgttacgtgcgttggatatgtatgatcccagtttggggtatgacaatgttaaagaagcattgtcacgcattaaagcacgctatacattggtttcagtgacaacggatcaactttttaaacccattgatctttataaaagtaaacagcttttagaacaaagtggagtcgatctacatttttatgaattcccatcagattacggacacgatgcgtttttagtggattatgatcagtttgaaaaacgaattcgagatggtttggcgggtaattaa

SEQ ID NO: 2660 - protein, 358 aa, Haemophilus influenzae
MSVQNVVLFDTQPLTLMLGGKLSHINVAYQTYGTLNAEKNNAVLICHALTGDAEPYFDDGRDGWWQNFMGAGLALDTDRYFFISSNVLGGCKGTTGPSSINPQTGKPYGSQFPNIVVQDIVKVQKALLEHLGISHLKAIIGGSFGGMQANQWAIDYPDFMDNIVNLCSSIYFSAEAIGFNHVMRQAVINDPNFNGGDYYEGTPPDQGLSIARMLGMLTYRTDLQLAKAFGRATKSDGSFWGDYFQVESYLSYQGKKFLERFDANSYLHLLRALDMYDPSLGYDNVKEALSRIKARYTLVSVTTDQLFKPIDLYKSKQLLEQSGVDLHFYEFPSDYGHDAFLVDYDQFEKRIRDGLAGN

SEQ ID NO: 2661 - DNA, 2643 bp, Haemophilus influenzae
atgacggattcaatccaatcatctatcacccctgtcaatatcgaagaagaacttaaatcttcctaccttgactacgcgatgtcggttatcgttgggcgtgcattacctgacgttcgagatggtttaaaacctgttcaccgccgcgtactattctcaatggatcgcgaaggcaataccgccaataaaaaatacgtaaaatcagcgcgtgttgtgggtgatgtaatcggtaaatatcacccgcatggtgactcagccgtgtacgatacaatcgttcgtatggcacaacccttctcacttcgctatatgttggttgatgggcaaggtaactttggttcaattgacggcgatgcacctgctgcaatgcgttataccgaagtgcgtatgcaaaaaattacgcaagcattgctcacggatttggataaagaaaccgtcaatttctcgccaaactatgatggcgaattaatgattccagatgtattgccgactcgtattccagcacttttagcaaatggttcttctggtattgcggtggggatggcaactaacattccccctcacaacttaaacgaagtattaaatggttgtttggcttatattgacaacaatgaaattaccattgatgaattaatgcaacatattccgggcccagactttccaaccgctgcattaattaatggtcgtaaagggattgaagaagcctatcgcactggtcgtggtaaagtgtatgttcgtgctcgtgcaaccgtagaaaccaacgaaaaaggacgcgagcaaattatcgtgtctgaattgccataccaagtaaataaagcaaaattagtcgagaaaatcgccgaattaattcgcgagaaaaaaatcgaaggtatcagcaatattactgacctttcaaataaagaagggatccgtattgaaattgatattaaacgtgatgcagtgggggaagtggtattaaaccatctttactcactcactcaaatgcaagtgacctttggtatcaatatggtggcattggatcacggtcagccacgtttatttaatcttaaagaaattattgaagcctttgttttacaccgccgtgaagtcgttacacgtcgttctatctttgagcttcgcaaagcacgtgaacgtacgcatattttggaaggtttagcggttgctcgttctaatatcgatgaaatgattgcgatcattcgtaactctaaaaaccgtgaggaagcggcaacagcaatcagttcacgctcttggacgttacatagcgatattattaatcttcttgatgcttctgctcgtcctgatgagttagaagaaaatcttggtattcaaggcgaacaatattacttatcgccagcgcaagtaaacgcaattctagaacttcgtttacaccgtttaacgggcattgcgtttgaagaagttataaaagaatatgaagaattattagttaaaattgcggatcttcttcatattttaagtagcgcagaacgtttaatggaagtaattcgtgaagaattggaagaagtaaaagcacaatttggtgatgatcgtttaactgaaattaccgctgcttctggcgatattgatttagaagatttaatcgcacaagaagacgtggttgtgacgctttctcacgaaggttatgtgaaataccaaccactgactgactatgaagcacaacgccgtggcggtaaaggcaaatctgcaacgaagatgaaagaagaagatttcatcgaaaaattactggtagcaaatactcacgataccatcctctgcttctctagccgtggtcgtttatattggttgaaagtatatcaacttccgcaagcgagccgtggcgcacgcgggcgtccaattgtgaatattcttccgttacaagaaaacgaacgtattactgcaatcttgccagtttctgcttacgaagaagataaattcgtagtcatggcaactgctggcggtattgtgaagaaaatcgccttaaccgaatttagccgtccacgttcaaacggtatcatcgcattgaatttacgtgacgaagatgaattaatcggcgtggatattactaatggcagcaacgaaattatgttgttctcatcgcaaggtcgcgtggtgcgttttgctgaaaatgccgtgcgtgcaatggggcgtttagcaacaggtgttcgcggtatcaaactggctttaacaaacgatatttctgacgatgaaagtgcggtagaaattgaagatatttctgatgacaacgctgaagcatcattagacttaaatatcgataaagtggtttctctcgttgtgccaaaaggtgaaggggcaattttaaccgcaacacaaaacggctacggaaaacgcacacaattaagtgaatacccaactaaatcacgtaatacaaaaggtgtgatttcgattaaagtgagtgaacgcaatggtaaagtcgttgccgcaactcaagtagaagaaacagaccaaattatgttgatcactgatgcaggaacgcttgttcgcacacgcgtaagcgaagtgagcattgtagggcgtaacacgcaaggtgtccgtttaattcgtaccgcagatgatgaacacgtagtaagtttagagcgtgtttgtgatgcggatgaagaagattctttggaagaaagtagttctgaagaataa

SEQ ID NO: 2662 - protein, 880 aa, Haemophilus influenzae
MTDSIQSSITPVNIEEELKSSYLDYAMSVIVGRALPDVRDGLKPVHRRVLFSMDREGNTANKKYVKSARVVGDVIGKYHPHGDSAVYDTIVRMAQPFSLRYMLVDGQGNFGSIDGDAPAAMRYTEVRMQKITQALLTDLDKETVNFSPNYDGELMIPDVLPTRIPALLANGSSGIAVGMATNIPPHNLNEVLNGCLAYIDNNEITIDELMQHIPGPDFPTAALINGRKGIEEAYRTGRGKVYVRARATVETNEKGREQIIVSELPYQVNKAKLVEKIAELIREKKIEGISNITDLSNKEGIRIEIDIKRDAVGEVVLNHLYSLTQMQVTFGINMVALDHGQPRLFNLKEIIEAFVLHRREVVTRRSIFELRKARERTHILEGLAVARSNIDEMIAIIRNSKNREEAATAISSRSWTLHSDIINLLDASARPDELEENLGIQGEQYYLSPAQVNAILELRLHRLTGIAFEEVIKEYEELLVKIADLLHILSSAERLMEVIREELEEVKAQFGDDRLTEITAASGDIDLEDLIAQEDVVVTLSHEGYVKYQPLTDYEAQRRGGKGKSATKMKEEDFIEKLLVANTHDTILCFSSRGRLYWLKVYQLPQASRGARGRPIVNILPLQENERITAILPVSAYEEDKFVVMATAGGIVKKIALTEFSRPRSNGIIALNLRDEDELIGVDITNGSNEIMLFSSQGRVVRFAENAVRAMGRLATGVRGIKLALTNDISDDESAVEIEDISDDNAEASLDLNIDKVVSLVVPKGEGAILTATQNGYGKRTQLSEYPTKSRNTKGVISIKVSERNGKVVAATQVEETDQIMLITDAGTLVRTRVSEVSIVGRNTQGVRLIRTADDEHVVSLERVCDADEEDSLEESSSEE

SEQ ID NO: 2663 - DNA, 1764 bp, Haemophilus influenzae
atgacagaacaaacctttattctcggcaaagatgccgcattagaagatagtattgcaaaatttcagcaaaaattgaccgcacttggttttaatattgaagaggcatcttggttgaatcctgtgccaaatgtgtggtctgtgcatattcgcgataaagactgcccgcaatgtttttctaatggtaaaggggcaagtaaaaaagcggcgttagcctctgcccttggcgaatactttgagcgtctttccaccaactatttttttgctgatttctatttagggcaagaaattgcaaacggcgattttgtgcattatcccaatgaaaaatggttcccgattgaagatgatgctttactgcctaatggcattttagatgattatttattggattattttgatcctaatgccgagcttacgcctgaattattggtagatttacagtctggcaattatgatcgtgggattgtggcgatgccttatgttcgtcagtcggacgaacaaaccgtttacattccacaaagtattattgccaacctttatgtttcaaatggcatgtctgcaggcaatacaaaatttgaagcacgcgtgcaaggcttgtcagaagtttttgagcgttatgtgaaaaacaaaattatcgctgaagcaattagtctgccagaaattccaaaatctgtgatggatcgctatccatctattcaggcttccattgcaaaattagaggaagaaggtttcccaatttatgcatttgatgcttcacttggcggaaaataccctgttatttgcgtggtgctactcaatccgaataacggcacatgctttgcctctttcggtgcacatccaaatttccaagtggcattagaacgtactgtgacggagcttttacagggtcgtagcttgaaagatttggatgttttctcaccgccctctttcaataacgatgatgtggctgaacacgctaatttagaaacccactttattgactcaagcggtttaatttcttgggatttactcaaaaaaacgcctgattatgaatttgctgattgggatttcagtggtaccacgcaagaagaatacaataatttaatggcgattttccgtgccgatgaaaaagaagtttacgtaatggattacaaccatttggatgtctatgcgtgccgtattattgtgccaggtatgtctgatatttatcctgcagacgatttaatttatgccaataataatatgggaatggattggcgcaaaattttactggatttaccaaactggcatcacgatgcagaaacctatcaaaaattattagaagaattagatggtcaagatattgacgatgcaactcgcgtgcgtgaatttatcggcatcgttgcacctaaaaatagcagctggacaaccttacgcgtgggtgaattaaaatctatgctccaccttgcattaggcgaattagaacaagcattagattgggcaaattggacgctgaatatgaacagctccgtattcaccacagaacctgtgaattattaccgcacattaatttccatcattgaattacatttagatcaaaatcgcgaaccagcgcaatatcgttcagtgtttgagaaaatgtatggtaaagatgcagttaaacaagcttgggcagctgtctctgaaggtggcaatccgttctacaatcttcctgcaagtgatgaaaatttggaaaactttaatgaacatcaggcgctgttgggggcttatgggaagttgcagaaagccaaaaaagaaaattggaaataa

SEQ ID NO: 2664 - protein, 587 aa, Haemophilus influenzae
MTEQTFILGKDAALEDSIAKFQQKLTALGFNIEEASWLNPVPNVWSVHIRDKDCPQCFSNGKGASKKAALASALGEYFERLSTNYFFADFYLGQEIANGDFVHYPNEKWFPIEDDALLPNGILDDYLLDYFDPNAELTPELLVDLQSGNYDRGIVAMPYVRQSDEQTVYIPQSIIANLYVSNGMSAGNTKFEARVQGLSEVFERYVKNKIIAEAISLPEIPKSVMDRYPSIQASIAKLEEEGFPIYAFDASLGGKYPVICVVLLNPNNGTCFASFGAHPNFQVALERTVTELLQGRSLKDLDVFSPPSFNNDDVAEHANLETHFIDSSGLISWDLLKKTPDYEFADWDFSGTTQEEYNNLMAIFRADEKEVYVMDYNHLDVYACRIIVPGMSDIYPADDLIYANNNMGMDWRKILLDLPNWHHDAETYQKLLEELDGQDIDDATRVREFIGIVAPKNSSWTTLRVGELKSMLHLALGELEQALDWANWTLNMNSSVFTTEPVNYYRTLISIIELHLDQNREPAQYRSVFEKMYGKDAVKQAWAAVSEGGNPFYNLPASDENLENFNEHQALLGAYGKLQKAKKENWK

SEQ ID NO: 2665 - DNA, 477 bp, Haemophilus influenzae
atgaaatttgaagtaatttataaatttttcttagtgtggggattagccttaagtttgcttttcgttgttgcaagtggcatttcaatgtggctaggatttccttttgctcaagccttagacattcatcttttctttgctggatttaccgtatttggtttgttactgcatttttatagccgtaagaagaaatgggtaaaaatcaacactcaatttgccgatctcatcacacataatcgcatgccttcttactgcaatttagatcgcttgatgatgactttcgagcatttttctattcaacaaatcgccgagcaacttaatctttctctcccgattttattaaatgaattatcgcaagctcaaataaacataactgatccccaccgcactttacgcgaaaactttcctctcaacgatgaaaaaattttcgccgcaattacaattgccttaaaagtgcggttcaatccaactttactttaa

SEQ ID NO: 2666 - protein, 158 aa, Haemophilus influenzae
MKFEVIYKFFLVWGLALSLLFVVASGISMWLGFPFAQALDIHLFFAGFTVFGLLLHFYSRKKKWVKINTQFADLITHNRMPSYCNLDRLMMTFEHFSIQQIAEQLNLSLPILLNELSQAQINITDPHRTLRENFPLNDEKIFAAITIALKVRFNPTLL

SEQ ID NO: 2667 - DNA, 993 bp, Haemophilus influenzae
atgaaaaaaatgttcacgattttcaccgcactttttgctttgcaagtgagtgctcaagatttaacttaccaagcaggcagcttgcctgaaccagccaaaattgaaaaagtattaagcgcaggtaatccgagtgatgtgttgttacttgctgttgcaccagagaaattggcaggttttgctggctttaaaatggaatcaaaagcaggtgcgttgtttgaaggtgagattaaaaaattacccacactcggtaaaattgcgggaaaaggcagtacgctttctgcagaaaaaatcgttgcgttaaaacctgacttgattattgatgtgggtaatgttgcgccgaattataaagatcaagctgaccgcacttttgctcaaactcaagtgccttatttgttgttagatggcagattaagtgaaacgcctgctttgttacgtaaattaggtaaattgcttggtaacgaaaaacaagctgaagaacaagctaaatatgcggaagacacgctgaaacaagctcgcgattttgctaaacaacatcataaaacagcctatttagcgcgtaatgcggatggcttgcaaactggtcaaaaaggttcgattcatacggaagcaatggaattggttggcttggaaaacgtcgcagagggagatcaaaaaggcttaactcaagtttcaatggaacagcttttattgtggaatcctcaaatgatttttacccaatatgatgagttttataaagcgcttgaaaacaatccgcagtggaaagaattaagtgcggtgaaaaatcagcaagttttctttgtgccgcatacaccatttggttggattgattcaccaccgagtttaaaccgtttattaggcgtgcgttggttacaacatatgttgaatggtaaggcgaatgctgactttgtgcctgaaattcaacgtttctataaattattttatcacattgatttaaccaatgaacaagtgcttaagttgtttcaagtaaaatga

SEQ ID NO: 2668 - protein, 330 aa, Haemophilus influenzae
MKKMFTIFTALFALQVSAQDLTYQAGSLPEPAKIEKVLSAGNPSDVLLLAVAPEKLAGFAGFKMESKAGALFEGEIKKLPTLGKIAGKGSTLSAEKIVALKPDLIIDVGNVAPNYKDQADRTFAQTQVPYLLLDGRLSETPALLRKLGKLLGNEKQAEEQAKYAEDTLKQARDFAKQHHKTAYLARNADGLQTGQKGSIHTEAMELVGLENVAEGDQKGLTQVSMEQLLLWNPQMIFTQYDEFYKALENNPQWKELSAVKNQQVFFVPHTPFGWIDSPPSLNRLLGVRWLQHMLNGKANADFVPEIQRFYKLFYHIDLTNEQVLKLFQVK

SEQ ID NO: 2669 - DNA, 1014 bp, Haemophilus influenzae
atgagatcgacttttcttttacgttcgcctcgtttgttttttgtcttgttagttggaatattgcttggcagtattttgcttgctttgaatgtggggaaatacccgctttcgcctagccaactttgggagacaataagctgttcgtttagcgggcaatgtgaaggaaatacggaacaaacagtactgtggcaaattcgtttgccacgtatttttgccgcttgttttgtcggggctgcgcttgcttgtgcgggcgcaacttatcaaggtatgtttaaaaatccgcttgtttcgccagatattttgggcgtttcagcgggcgcaggttttggggcaagtttggcaattttttataatttgccaatgatttatatccaattttttgcttttagcggtggcattttagctgtgttatgtgtatcgctcattgcctcgcgtagtcgtacacaagatcctattttagtgctggtgctttctgggattgcaattggttctttacttggtgcaggcatttctttgttaaaaattcttgcggatcctttcactcaattaccttcaatcactttttggctacttggtagcctgacggctattaatcaacaagatttaattcaattgatcccgatattgttgctagggattgttcccatttttttattgcgttggcggttaaatttactgtctcttgatgaagatgaagcacaaacgctaggtgtaccgattaaacgtactcgctggattttaattgtgttcaccacactttgtacggcaagtgcggtggcaatgacaggaattatcggctgggttggtttgttggtgccacacatcgcacgcttgttagtgggagcaaattttattcgtttattgccgacatccttattgcttggtgcgtcttttttattacttactgatacgctggctcgcacgattgcgcctattgaactgccactcggtattctgacttctgcttgtggtgcaccatttttcctttatttattagtgcaagggcaaaaataa

SEQ ID NO: 2670 - protein, 337 aa, Haemophilus influenzae
MRSTFLLRSPRLFFVLLVGILLGSILLALNVGKYPLSPSQLWETISCSFSGQCEGNTEQTVLWQIRLPRIFAACFVGAALACAGATYQGMFKNPLVSPDILGVSAGAGFGASLAIFYNLPMIYIQFFAFSGGILAVLCVSLIASRSRTQDPILVLVLSGIAIGSLLGAGISLLKILADPFTQLPSITFWLLGSLTAINQQDLIQLIPILLLGIVPIFLLRWRLNLLSLDEDEAQTLGVPIKRTRWILIVFTTLCTASAVAMTGIIGWVGLLVPHIARLLVGANFIRLLPTSLLLGASFLLLTDTLARTIAPIELPLGILTSACGAPFFLYLLVQGQK

SEQ ID NO: 2671 - DNA, 765 bp, Haemophilus influenzae
atgttactcgaaacccaaaatcttgccattggctatgaaggaaaaacactggttcaacatatccgatttaccctagaggaaaatcaaatttgttgtttgcttggtgcaaatggtgcaggcaaaagtacgtttttgaaaactttacttggtttacaaccgcctattggtggtgatattgtttggcaaggaaaatcactttctgattattcaccaacagaatttgctcggcatattgcttatgtgccacaagcgcattctcattcatttccttttttagtgcaggatatggtgatgatggggcgatctgcttttttaaagtggtatcaaactccgaaaaaatctgatttggatttagcattaatggcgttgcaagagttagaaattgctcatcttgcgcaacgttattatcatcaattaagtggcggcgaaaaacagcttgtgttgattgctcgtgcgattgctcaacaagccaaacttttaattatggacgaaccgacttctagccttgattttggtaatcaaattcgagtgttagaaaaaataaaacaactgcaaaagcaaaatattgcgcttattattagtacgcataatccacaacaagcggcatttttaggagataatattgttttgcttgatcaacaatttggctttcaacaaggcgataaaaaacatttattaaccttagaaaacttggcgaaaatttaccgcacttcgtccgaacttttacatcaacatttgaataattacattgaaaaatcactatga

SEQ ID NO: 2672 - protein, 254 aa, Haemophilus influenzae
MLLETQNLAIGYEGKTLVQHIRFTLEENQICCLLGANGAGKSTFLKTLLGLQPPIGGDIVWQGKSLSDYSPTEFARHIAYVPQAHSHSFPFLVQDMVMMGRSAFLKWYQTPKKSDLDLALMALQELEIAHLAQRYYHQLSGGEKQLVLIARAIAQQAKLLIMDEPTSSLDFGNQIRVLEKIKQLQKQNIALIISTHNPQQAAFLGDNIVLLDQQFGFQQGDKKHLLTLENLAKIYRTSSELLHQHLNNYIEKSL

SEQ ID NO: 2673 - DNA, 807 bp, Haemophilus influenzae
atgactatttacgacatcaattttgctgaactttatcaacagcacttaatcgcttgtaatcattacaacttacctccgataaaatgggataaaaaagccgtgaaaatggcagaaaatttggtcggcaaaccttcagcatataatcagcaattattgcaagctatgaatgtgcaagccgatgaaaccgtgttggatattggctgtgggcctggtacttttgctgtgccactcgcacaacaaggttcaacggtatatgccttggattatagcaatggaatgttagactgtttggcacaattcaaacagaaattggggttgcatcatctcacgacatttcataaatcttgggcggataattgggatgatgtgccacaagctgatgtagtgttggcatctcgttcaacgttggtggacgatttggacgatatgattgaaaaactctgtgccaaagcgaaaaaacgtgtgtttttgacttctgtcacacaacgccatttcttagatgagggcgtatttgaggcaattggccgtgaagatattggtttccccacttatatttatttactcaatcggttgtatcaaaaaggcattcaggcaaatttgaattttattgaaacggaatcgggttgttttcaaggtgaaagctacgaggatttgttagcctcggtggaattttctttaggcgagctgtccgaaaaagaaaaacaaggtttaaaagccttttacgatcgtaaacaaaccaataacgaacccatttctcacggacagaaaaaatgggcgttaatttggtggaatgtggatcgcatctaa

SEQ ID NO: 2674 - protein, 268 aa, Haemophilus influenzae
MTIYDINFAELYQQHLIACNHYNLPPIKWDKKAVKMAENLVGKPSAYNQQLLQAMNVQADETVLDIGCGPGTFAVPLAQQGSTVYALDYSNGMLDCLAQFKQKLGLHHLTTFHKSWADNWDDVPQADVVLASRSTLVDDLDDMIEKLCAKAKKRVFLTSVTQRHFLDEGVFEAIGREDIGFPTYIYLLNRLYQKGIQANLNFIETESGCFQGESYEDLLASVEFSLGELSEKEKQGLKAFYDRKQTNNEPISHGQKKWALIWWNVDRI

SEQ ID NO: 2675 - DNA, 702 bp, Haemophilus influenzae
atgttatttgctttacctgcgctgaatgataactacatttggctttatcaacgagaaaatctgccgcttattattgtcgatttgcctgaaacggacaagctgtttgcatggctagagaagcaaaacgcaacgattgaagcggtgttgcttactcacgaacatgatgatcatacacaaggtgtgtcggcatttaaaaaacgttatccaacagtgccgatttatgggccgcaagaatgtgagaaaaaaggtgcgactcaaattgtgaacgaagggaagatccttaccgcaaattatcaaattgatgtcattccgacggggggacacactaaacagcacgttagttttttagtagataatcatttattttgtggcgatgcgttattttctgcaggttgcggacgtgtttttacaggcaattatgcgcagatgtttgaaggtttgcagcgtttgaatacattgcctgacgagacgattgtttgtcctgctcacgagtatactttggggaatttagcgtttgcggaaactgtgttggtagaaaaaagtgcggtagaaaaacaacgtatttttgttgaaacacaacgggctgaaaataaaccgagtttgccaacaaccttaaaactagagcgagaaattaatccgtttttacaagcaaaaacacttgaagaatttaccgcacttcgtaaagccaaagatattttctaa

SEQ ID NO: 2676 - protein, 233 aa, Haemophilus influenzae
MLFALPALNDNYIWLYQRENLPLIIVDLPETDKLFAWLEKQNATIEAVLLTHEHDDHTQGVSAFKKRYPTVPIYGPQECEKKGATQIVNEGKILTANYQIDVIPTGGHTKQHVSFLVDNHLFCGDALFSAGCGRVFTGNYAQMFEGLQRLNTLPDETIVCPAHEYTLGNLAFAETVLVEKSAVEKQRIFVETQRAENKPSLPTTLKLEREINPFLQAKTLEEFTALRKAKDIF

SEQ ID NO: 2677 - DNA, 861 bp, Haemophilus influenzae
atgaaaaacgaattaatttgctataaacaaatgccagtgtggacaaaagacaaattgccacaaatgttccaagaaaagcacaatacaaaagtcggcacttgggggaaattaactgtattaaaaggtaagatcaaattttatgagctaaccgaaaatggcgatgttgttgccgagcatatttttaccccagaaagccacattccttttgttgaacctcaagcatggcatcgtgtagaagcactttctgatgacctagaatgtaccctaggtttctattgcaaaaaagaagattatttcagtaaaaaatacaacatgactgccattcacggcgatgtggtggatgcagcaaaaattatctcgccttgtaaagtattagatttaggttgcggacaagggcgtaattcactttatttaagtttattaggctatgatgtgacctcttgggatcacaatgaaaacagcattgcctttttaaatgaaaccaaagagaaagaaaaccttaatatttctaccgcactttacgacattaacgccgccaacattcaagaaaactatgattttattgtttcaacggtggtgtttatgttcttaaatcgtgaacgtgtgccgtcaatcatcaaaaatatgcaagaacataccaatgttggcggatataatttaatcgttgccgccatgtccacagatgatgtgccttgcccacttccattctctttcacttttgctgaaaacgaattgaaagaatattacaaagattgggaattcttagaatataacgaaaatatgggcgaattacacaaaaccgatgaaaacggcaatcgcattaaaatgaaatttgccaccatgttagcgagaaagaaataa

SEQ ID NO: 2678 - protein, 286 aa, Haemophilus influenzae
MKNELICYKQMPVWTKDKLPQMFQEKHNTKVGTWGKLTVLKGKIKFYELTENGDVVAEHIFTPESHIPFVEPQAWHRVEALSDDLECTLGFYCKKEDYFSKKYNMTAIHGDVVDAAKIISPCKVLDLGCGQGRNSLYLSLLGYDVTSWDHNENSIAFLNETKEKENLNISTALYDINAANIQENYDFIVSTVVFMFLNRERVPSIIKNMQEHTNVGGYNLIVAAMSTDDVPCPLPFSFTFAENELKEYYKDWEFLEYNENMGELHKTDENGNRIKMKFATMLARKK

SEQ ID NO: 2679 - DNA, 2049 bp, Haemophilus influenzae
atgacaactcaaccccgtaaaattttagtcacttgcgccttgccttatgccaatggggcaattcatttaggccatatgttagaacatatccaagcggatatttgggtgcgttttcaacgtatgcgtggcaataaaatccattttgtctgtgcggacgatgcgcacggcacgcctattatgctgaatgccgataaacttggcattacacctgaagaattaattgctaaagcaaaagccgatcacattcgtgattttgcaggtttcaatattagttttgataactaccattctactcacagcgaagaaaacaaacagctcactgcagaaatttacaataaactcaaagccaatggctttattaagagtaaagttatttctcagttattcgatcctgaaaaaaatatgttcttgcctgatcgttttgtgaaaggcacttgcccgaaatgcaaagcagaagatcaatatggcgataactgcgaagtgtgtgcttctacttatagcccaatggatttaattaatcctcgttcagctgtttctggcacaacacctatcgtaaaagaatctgaacactttttctttgacttgcctgcatttgaagggatgttaaaagaatggactcgttctggctcacttcaatctgaaattgccaacaaaatgcaagaatggtttgaaagcggtttacaacaatgggatatttcacgcgatgcgccttatttcggttttgaaattcccggcgcaaaagataaattcttctatgtttggttagatgcgcctatcggctatatggcttcattcaaaaatctatgtgagcgtgaaggcattgatttcagtgaattttgggctgaaggcagtgatgcagagctttatcatttcatcggtaaagatatcgtttatttccacagtctattctggcctgcaatgcttgaaggcagtggctatcgtaaaccgactaatgtgttcgctcatggctatgtcacggtggatggggcgaagatgtcaaaatctcgcggcacattcattcaagccagcacttatttgaatcatatcgatcctgaatgtttgcgttattactatgcagcaaaattaaatgatcgcattgaagatttagactttaaccttgacgatttcgtacaacgtgtcaatacggatattgtaaacaaattagtgaatttagcttcacgcaatgcgggctttattgcgaaacgctttgaaggcaaacttgcggataaactggaagatgaagcattatttgcagaatttaccgcccaagccgagcaaatcgctgcttattacgaaagccgtgaatacaataaagccattcgtgaaattatggcattaacggataaagccaataaatatattgatgaaaaagccccttgggtgattgcaaaagaagaaggcaaagaggcagaattgcaagccgtatgttcaatgggtattgagcttttccgcgtgttgatgtcttacttaaaacctgttcttccaaaactggctgagcgtgcagaaaccttcttacaagctgaattacgttgggataatattcatcaaccattacttggtcatacccttgcaccgtttaaagccttattctctcgtttagagaaaaaacaaattgatgccgttgtagaagaaaccaaagccttatttgcagcagccaataaagccgctgaaaaaacagaagcaaaaccaaccgcactttctgccgttgaacctattgctgaaaccatcacgattgatgatttcgccaaacttgatatgcgtgtggcaaaagtattgaaatgcgaagcagtgccagaatctaataaacttttacgttttgaattggatcttggtgatcatactcgtcaagtcttctctggcattaaagcggcttataataagcctgaagaattagaaggtcgttttgtgattatggtggcaaaccttgcaccacgtaaaatgaaattcggcgtgtctgagggaatgattctatccgcaggaacgggcggtagtgatttattcttgttatctgccgataatggtgtcactgcgggcatgcaagttaaataa

SEQ ID NO: 2680 - protein, 682 aa, Haemophilus influenzae
MTTQPRKILVTCALPYANGAIHLGHMLEHIQADIWVRFQRMRGNKIHFVCADDAHGTPIMLNADKLGITPEELIAKAKADHIRDFAGFNISFDNYHSTHSEENKQLTAEIYNKLKANGFIKSKVISQLFDPEKNMFLPDRFVKGTCPKCKAEDQYGDNCEVCASTYSPMDLINPRSAVSGTTPIVKESEHFFFDLPAFEGMLKEWTRSGSLQSEIANKMQEWFESGLQQWDISRDAPYFGFEIPGAKDKFFYVWLDAPIGYMASFKNLCEREGIDFSEFWAEGSDAELYHFIGKDIVYFHSLFWPAMLEGSGYRKPTNVFAHGYVTVDGAKMSKSRGTFIQASTYLNHIDPECLRYYYAAKLNDRIEDLDFNLDDFVQRVNTDIVNKLVNLASRNAGFIAKRFEGKLADKLEDEALFAEFTAQAEQIAAYYESREYNKAIREIMALTDKANKYIDEKAPWVIAKEEGKEAELQAVCSMGIELFRVLMSYLKPVLPKLAERAETFLQAELRWDNIHQPLLGHTLAPFKALFSRLEKKQIDAVVEETKALFAAANKAAEKTEAKPTALSAVEPIAETITIDDFAKLDMRVAKVLKCEAVPESNKLLRFELDLGDHTRQVFSGIKAAYNKPEELEGRFVIMVANLAPRKMKFGVSEGMILSAGTGGSDLFLLSADNGVTAGMQVK

SEQ ID NO: 2681 - DNA, 1113 bp, Haemophilus influenzae
atggcaacctacttttctgataatttgactgccgaccagcaaaaccaagttcagcagattatccaacaatttcagcatccaaccctgcaaaaggatctgattgcgcttaatactttgaaaaaagtggaaaagggcggcgatactttacgcattgaattgaaattgccttttgcgtggaattctggtgcagaacagttaaaacaagcggtttcagatgcgttgttgaaagcaacagattgtaaattaattaaatgggcggtggcttatcaaatcgcaacacttaaacgtgcaaataatcaacctgctgtaaaaggtgtgaaaaatattattgcggtgagttctggtaaaggcggcgtagggaaatcatcggtttctgttaatctagctttagcattacaagcacaaggagcacgtgttgggattttagatgcggatatttatggcccttctattcctcatatgttaggcgcagcggatcaacgcccgacttcgccagataatcaacacatcaccccaattaaagcacatggtttatctgcaaattccattggctttttaatgaatgaagacagcgcaacaatttggcgtggcccgatggcgagtagtgcattaagccaattattaaatgaaactctatgggatagtttagattatcttgttatcgatatgcctcctggcactggcgatattcaacttaccttatcgcaacaaatccctgtgactggtgcagtggttgtgacaactccacaagatattgctttgcttgatgcagtgaaaggtatctcaatgtttgagcgagtatccgtaccagtgttaggcattgtggaaaatatgtcgatgcatatttgtagtaagtgcggtcatcacgaagcgatttttggcacaggcggtgcagagaaaatggcggaaaaatacaatgtgaaagtattagctcaacttcctctgcatattcgtatccgtgaagatttagatgcaggcaacccgaccgttgtgcgagtgcctgaaaatgaaatttcacaagcgttcttacaacttgcagaaaaagtctctacagaactttactggcaaggttccgtaatcccaagcgagattttatttaaagaagtgaaataa

SEQ ID NO: 2682 - protein, 370 aa, Haemophilus influenzae
MATYFSDNLTADQQNQVQQIIQQFQHPTLQKDLIALNTLKKVEKGGDTLRIELKLPFAWNSGAEQLKQAVSDALLKATDCKLIKWAVAYQIATLKRANNQPAVKGVKNIIAVSSGKGGVGKSSVSVNLALALQAQGARVGILDADIYGPSIPHMLGAADQRPTSPDNQHITPIKAHGLSANSIGFLMNEDSATIWRGPMASSALSQLLNETLWDSLDYLVIDMPPGTGDIQLTLSQQIPVTGAVVVTTPQDIALLDAVKGISMFERVSVPVLGIVENMSMHICSKCGHHEAIFGTGGAEKMAEKYNVKVLAQLPLHIRIREDLDAGNPTVVRVPENEISQAFLQLAEKVSTELYWQGSVIPSEILFKEVK

SEQ ID NO: 2683 - DNA, 663 bp, Haemophilus influenzae
atgactcaacttactcgtgaacaagttcttgaactcttccatcaacgcagctcaacacgttattacgacccaacaaaaaaaatcagtgatgaagattttgaatgtattttagagtgcggtcgattatcgccgagttctgtaggttctgagccttgggaatttttagtgattcaaaataaaaccttacgcgaaaaaatgaaaccttttagctggggaatgataaatcagcttgataattgcagtcatcttgtggtaattctcgcgaaaaaaaatgcccgttatgacagcccattttttgaggatgtaatggtgcgcaaaggcttgaacacagagcaacaacaagccgccctcgcaaaatacaaaaccctgcaagaagaagatatgaaattactggaaagcgaccgcactttatttgattggtgcagtaaacaaacttatatcgcccttgcaaatatgcttactggagcttcagcccttggcatcgactcttgcccaattgaaggttttcattacgacaaaatgaatgaatgcctcgccgaagaaggattattcgatcctcaagaatatgcggtttctgtcgccgcaacctttggctatcgctcacgcgatattgcgaaaaaatcccgtaaaggattggatgaagtggtgagatgggtaaggtaa

SEQ ID NO: 2684 - protein, 220 aa, Haemophilus influenzae
MTQLTREQVLELFHQRSSTRYYDPTKKISDEDFECILECGRLSPSSVGSEPWEFLVIQNKTLREKMKPFSWGMINQLDNCSHLVVILAKKNARYDSPFFEDVMVRKGLNTEQQQAALAKYKTLQEEDMKLLESDRTLFDWCSKQTYIALANMLTGASALGIDSCPIEGFHYDKMNECLAEEGLFDPQEYAVSVAATFGYRSRDIAKKSRKGLDEVVRWVR

SEQ ID NO: 2685 - DNA, 675 bp, Haemophilus influenzae
atgacaagaattgcaattattcctgcgagagcaggttctaaaggaattaaagacaagaatttacagcttgtggggggcgtttctttggtggggcgtgcgattttggcagcgcaagaatcgggtatgtttgatcaaattgtggtgacatcagatggcgaaaatattttaaaagaggctgcaaaatatggcgcaaaaccagtggcacgccctgaaagtttggcacaaagtgatacacgcaccattgatgctattttgcattgcttagaaacacttaatatttcacaaggcaccgctgtacttttgcaaccaaccagcccattgcgtaatgctttagatattcgtaatgcaatggaaattttccttggaggcaaatataaatcagtggtttcagcttgcgaatgtgagcatcatccttataaatccttcactttagaaggtaccgaagttcagcctattcacgaattaacggattttgaatcccctcgccaaaaattacccacatcttatcgtgcaaatggcgcaatttatattaatgacatcgaaagtctctttgaagaaaaacgcttttttatcgcaccaatgcgtttttatttaatgccaacttatcgttccattgatattgattccacacttgatttgcaattagcagaaagtttaatttcaaaagaattctaa

SEQ ID NO: 2686 - protein, 224 aa, Haemophilus influenzae
MTRIAIIPARAGSKGIKDKNLQLVGGVSLVGRAILAAQESGMFDQIVVTSDGENILKEAAKYGAKPVARPESLAQSDTRTIDAILHCLETLNISQGTAVLLQPTSPLRNALDIRNAMEIFLGGKYKSVVSACECEHHPYKSFTLEGTEVQPIHELTDFESPRQKLPTSYRANGAIYINDIESLFEEKRFFIAPMRFYLMPTYRSIDIDSTLDLQLAESLISKEF

SEQ ID NO: 2687 - DNA, 426 bp, Haemophilus influenzae
atgctacaagatgcggtaaaggatttaggctgtgaattgtggggaattgagtgtcagcgcgtgggtcgttttatgacagttcgtttatttatagataaagaaggtggtgtgacagttgatgattgtgctgatgtaagtcgtcaagtgagcgcaattttagacgtggaagatccaattgcggataaatataatctagaagtgtcgtcacctggtttagatcgtccgctatttaccttgccgcaatttgaacgctatattgggcaagatatcgctgtgcatttgcgaattccagtgatggaacgccgtaaatggcaaggtaagttagagcgtattgaaaaggatatgattactttaatcgttgatgatcaagaacaaattttagtcttcggaaacattcaaaaagcgaatgttgttgcaaaattttaa

SEQ ID NO: 2688 - protein, 141 aa, Haemophilus influenzae
MLQDAVKDLGCELWGIECQRVGRFMTVRLFIDKEGGVTVDDCADVSRQVSAILDVEDPIADKYNLEVSSPGLDRPLFTLPQFERYIGQDIAVHLRIPVMERRKWQGKLERIEKDMITLIVDDQEQILVFGNIQKANVVAKF

SEQ ID NO: 2689 - DNA, 1488 bp, Haemophilus influenzae
atgagtaaagaaattttactggcggcggaagctgtatccaatgaaaaattattaccacgtgagaaaatttttgaagcattagagagtgcgattgcgatttctactaagaagaagtttgaatatgaaacggatattcgcgtttcaattaatcccaaaacaggagaatttgatacttttcgccgttggttagtcgtagatgaagtaaaagtaccaacgaaggaaattactttggaagcggcgcaatttgatgatccaaatttgcaacttggagagtatgtagaagatcaaattgaatctattgcatttgaccgtattgcaatgcaaacagcacgtcaagttattagtactaaaattcgtgaagccgaacgtgcaaaagtggttgaacaatttcgtgaagaagaaggaaaaattgtaacaggcactgtaaaaaaagtaagtcgagacagtattattttagatcttggcaataaagcggaagcgatgattgcgcgtgaagatatgttaccacgtgaaaacttccgtccgggagatcgtgttcgtggggtactttataaagtaaatcctgaaggtaaaactgcacaattatttgtgacacgttctaaaccagaaatgttgatcgaattattccgtattgaagtgcctgaaattggcgaagaaatgattgagattcgtggtgcagctcgtgatgctggctctcgcgctaaaattgcagtgaaatcaaatgataagcgaattgatccagttggtgcttgtgtaggaatgcgtggtgcgcgtgttcaggtaattacgaatgaacttggtggcgagcgtgtagatatcgtgctttgggatgacaatcctgcgcaatttgtgattaatgcgatggcacctgcagatgtttcttctattatcgttgatgaagataatcattctatggatattgctgttgaagctgataatcttgctcaagccattggtcgtaatggtcaaaacgtgcgtttagcaacacaattaacgggttggacactaaacgtaatgacgactgatgagttaaatgctaagcatcaagcagaagataaaaaagtgttaaatttatttattaacgcattagaacttgatgaagaatttgctcaaatccttgtagaagaaggcttcacaagtttagaagaaattgcttatgtgccaatgaatgaattgacagcaattgatggtttggaagatgaagatcttgttgaagagcttcaaactcgtgctaaaaatgcgattacagccgcagcagtagctgaagaagaagcactgaaaaaagcgaatattgaagatcgtttattgaatttagagggaatgaatcgtcacgttgcgatcaaactagcagaaaaacaaattaccacccttgaagaactcgcagaacaaggcgttgatgatttaactgatattgaagaattaaccgcagaacaggccgcagatttaattatggctgcacgtaatatttgttggtttggcgaagaataa

SEQ ID NO: 2690 - protein, 495 aa, Haemophilus influenzae
MSKEILLAAEAVSNEKLLPREKIFEALESAIAISTKKKFEYETDIRVSINPKTGEFDTFRRWLVVDEVKVPTKEITLEAAQFDDPNLQLGEYVEDQIESIAFDRIAMQTARQVISTKIREAERAKVVEQFREEEGKIVTGTVKKVSRDSIILDLGNKAEAMIAREDMLPRENFRPGDRVRGVLYKVNPEGKTAQLFVTRSKPEMLIELFRIEVPEIGEEMIEIRGAARDAGSRAKIAVKSNDKRIDPVGACVGMRGARVQVITNELGGERVDIVLWDDNPAQFVINAMAPADVSSIIVDEDNHSMDIAVEADNLAQAIGRNGQNVRLATQLTGWTLNVMTTDELNAKHQAEDKKVLNLFINALELDEEFAQILVEEGFTSLEEIAYVPMNELTAIDGLEDEDLVEELQTRAKNAITAAAVAEEEALKKANIEDRLLNLEGMNRHVAIKLAEKQITTLEELAEQGVDDLTDIEELTAEQAADLIMAARNICWFGEE

SEQ ID NO: 2691 - DNA, 2490 bp, Haemophilus influenzae
atgactgaagatgttaaggctgatgcaccaaaaaaattaagcattcaacgcagaacaaaaacaacagtgagcagtaccacaactggcggtaaaagcaaagaagtacaagtagaagtacgtaaaaaacgcacagtaaaaactgatattgctcaacaagaagaagcaaaattaaaagcacagcaagaagcggaagcgaaaaaaattgctgaacaaaaagcagcagaagaaaaagctcgtttagaagctgaaaaagtgaaagctgaaactgctaagccagtaaaaagtgcggtagattctaaagtgaaatctgttgatcctgaaaaagagaaacgtaaagcagaagaagcagaacttcgtcgtaaagctgaagaattagctcgtcaaaaagcagaagaacaagctcgtcgtgcagtagaagaagcgaaacgttatgctgaagcagatgattcagacaatgaatcttcttcagaagactattctgattacaatctaagttcaagatatgcacttgaagcagaagatgaagaagatcgtcgtaatgaaaatcgtggccgtggcaaaaataaagtagcgaaagcgaaaaaaggcggtcgcgacgatgaaaatagcaaaaactcgaaaaacgagcgtgaatctaatcgtaaaaatcaaaaagacgctaagtttggtaaaggtaaaaatggcaaaaaaggtaccccacttcaacaagcctttactaaacctgctcaagtagttaaatcgaatgtagtcattggagaaaccattacggttgcagaacttgcgaataagatggcggtaaaagctacagagattatcaaaatgatgatgaagatgggcgaaatggttactatcaaccaagttatcgaccaagaaaccgctcaattagtagcagaagaacttggtcataaagtgattcttcgtaatgaaaatgagcttgaagaagcggtattaggcgatcgtgatgtaaacgcagaaaaagtaacccgtgcgccagttgtaaccatcatgggtcacgttgatcatggtaaaacctctttacttgactatattcgtaaagcgaaagttgctgcaggcgaagcgggtggtattactcaacatatcggtgcgtatcacgtagaaatggatgatggtaaaatgattactttcttggatacgccaggacacgctgcgtttacttctatgcgtgcacgtggtgcaaaagcaacagatatcgttgttcttgttgttgcggccgatgatggtgtgatgcctcaaactatcgaagcgattcaacacgcaaaagcagcgggagcacctttagtggttgcagtaaataaaatcgataaaccagaagcaaatctagatcgtgttgagcaagaattattacaacatgatgtcatttctgagaaattcggtggtgatgtgcaattcgttccagtatcggcgaagaaaggtacaggggttgatgatttattagatgcaatcttacttcaatctgaagtgcttgaattgactgctgtaaaagacggcatggcaagtggtgtagtcattgaatcttacttggataaaggtcgtggccctgtggcaactatcttggttcaatcaggtacactacgtaaaggtgacatcgtactttgtggttttgaatatggccgtgtgcgcgcaatgcgtgatgaaaacgggaaagaagtggatgaagcagggccttcaattccagttgaattattaggtctttcaggtgtgcctgcagcaggtgatgaagcaaccgttgtacgtgatgagaaaaaagcacgtgaagtggcgttatatcgtcaaggtaaattccgtgaagtgaaattagctcgtcagcaaaaagcgaaacttgaaaatatgtttagcaatatgtctgaaggcgatgtggctgaattgaacgttattgtgaaagcggatgtacaaggctctgtagaggcgattgttcaagcgttaaatgaactttctaccaatgaagtaaaagttaaagttgttggttcaggtgtaggtggtattactgaaactgatgcaactttagctaccgcatctaatgccatcattgttggctttaatgttcgagcggatgcaacagctcgtcgtgtcattgaagctgaaaacattgatttacgttactactcaatcatctatgaattgttgaatgaaattaaagcagcaatgagcggtatgttagagcctgaatttaaacaagaaattattggcttagctgaagttcgtgatgtattccgtcatccgaaatttggtgcaatcgcaggttgtatggtaactgagggtgtagtgaaacgtaacaacccaatccgtgtattacgtgacaacgtcgttatctttgaaggggaattagaatctcttcgccgtttcaaagacgacgtatctgaagttcgtaatggtatggaatgtggtatcggcgtgaaaaactacaacgatgtaaaagtcggcgaccaaatcgaggtgtttgaagtggttgaagttaaacgttcgatttaa

SEQ ID NO: 2692 - protein, 829 aa, Haemophilus influenzae
MTEDVKADAPKKLSIQRRTKTTVSSTTTGGKSKEVQVEVRKKRTVKTDIAQQEEAKLKAQQEAEAKKIAEQKAAEEKARLEAEKVKAETAKPVKSAVDSKVKSVDPEKEKRKAEEAELRRKAEELARQKAEEQARRAVEEAKRYAEADDSDNESSSEDYSDYNLSSRYALEAEDEEDRRNENRGRGKNKVAKAKKGGRDDENSKNSKNERESNRKNQKDAKFGKGKNGKKGTPLQQAFTKPAQVVKSNVVIGETITVAELANKMAVKATEIIKMMMKMGEMVTINQVIDQETAQLVAEELGHKVILRNENELEEAVLGDRDVNAEKVTRAPVVTIMGHVDHGKTSLLDYIRKAKVAAGEAGGITQHIGAYHVEMDDGKMITFLDTPGHAAFTSMRARGAKATDIVVLVVAADDGVMPQTIEAIQHAKAAGAPLVVAVNKIDKPEANLDRVEQELLQHDVISEKFGGDVQFVPVSAKKGTGVDDLLDAILLQSEVLELTAVKDGMASGVVIESYLDKGRGPVATILVQSGTLRKGDIVLCGFEYGRVRAMRDENGKEVDEAGPSIPVELLGLSGVPAAGDEATVVRDEKKAREVALYRQGKFREVKLARQQKAKLENMFSNMSEGDVAELNVIVKADVQGSVEAIVQALNELSTNEVKVKVVGSGVGGITETDATLATASNAIIVGFNVRADATARRVIEAENIDLRYYSIIYELLNEIKAAMSGMLEPEFKQEIIGLAEVRDVFRHPKFGAIAGCMVTEGVVKRNNPIRVLRDNVVIFEGELESLRRFKDDVSEVRNGMECGIGVKNYNDVKVGDQIEVFEVVEVKRSI

SEQ ID NO: 2693 - DNA, 3183 bp, Haemophilus influenzae
atgctcaacgaaaatgacatcgaacaacttacccttcaacgcctgcaatccctcggttgggaatatcgctacggtaaagacttgcctgttcatgagggcaagtttgcccgtggcgatttgagcggcgtagtctttgttgagcaactgcgtgaggcggtgcgtaaacttaatcctcagctgcctgaaagtgcggtggattctgtagtgaaatcggcgacgaaaagcgatattggcgacttggtggtacgcaatcaggcgttttataaactgctgcgtgatggcgtgcgggtggaatatcaggctcccaatagccacggacaaaatgagcagaaaatcgagatggcgcgtttggtggatttcgagcattggggaaacaaccgttttgtcgccgtcaatcagttggaaatccgcagccgtaaagggggcaagcggattcccgatattaccggctttgtaaatggcttaccgttggtggtatttgagctcaaaaatccactacgtgaatcggcggatttgttgcaggcgtttaatcagtttgaaacctataaagatgaaattgccgagctgtttgtttacaaccaagccctgattatttcagacggtattgtcgcccgtttgggttcgctttcggcagatttccaacgctttacgccgtggaaagtggtcgatgaaaaaaataaaagcgcacggttatattttgacgatgagttgcaaagcctgcttaatggcttgctaaagcctaaggatttattggactatatccgctatttcgtcttgtttgaacgagattccgttggcaaaaccattaaaaaaatcgcggcgtaccatcaatattacggcgtaaatgaagcagtagaatccacgatttttgccacaagcgagcaaggcgataaacgcattggtgtgatgtggcatacgcagggttcgggcaagtcgatttcgatgctgttttatgcaggcaaactgcttgcacagcctgaattgaaaaatcctaccattgtagtggttaccgaccgcaacgatttagatggtcagctcttccaaaccttttcttcaggcaaagatttaatcaagcaaacaccgcaacaagtggaagaccgtgatcaactacgccaactgctcgcgcaaaatgaagtcggcggcgtgttttttactacgattcagaaattcgccctaaatgaggaagaaagccgcttccctattttaaatgagcgcaacaatattattgtgatcagcgatgaggctcaccgcagccaatatggctttacgcaaaagctgcataacggcaagtttcagacaggctacgcccgccatttgcgtgatgctttacctaatgcctcgtttattggttttacaggtacgccaattagccttgaagataaggacacgcaagatgtgttcggtcgttatgtgtccatttatgacttgcaagatgcggtggaagatggcgcaaccgtgccgattgtgtatgaagcacgccaaatcaagctagcggagaatgctaatcacgatgaattatttgcagaaattgatgaactgctggaaggcgaaaaaaacccgaaattacgcttgcgagaaaaattgctcggctcagaagctcgattgcatgatttagcggtcgattttgtgcaacattttgccaaacgcaatgaagtggtggacagcaaagcgatgatggtggtttccagccgtcagatttgcgtggatttgtataatcagatcatcgctctgcaccctgaatggcattcggacaatattaacgaaggggcgattaaaattgtgatgacaggttctgcttccgatgcgtctgaaatgcagaaacacgtttacagtaaacaggaaaaacaaacgctagaacgccgctttaaagacccgaacgatccgctgaaggtggtgattgtgcgtgatatgtggctgacaggctttgatgcgccttgctgtaacacgatgtatatcgacaagccgatgcaggggcataacctaatgcaagccatcgcccgagtaaaccgtgtattccgtaataaaagccgagaaaatggtggcttgattgtggattatgtaggcattgctgacgagctcgaaaaagccactcggcaatatacaaactcacaaggcaagggcaaactggctgatagcgtgattgatgtattctttaaaatgaaagagcatttagaagttatccgcagcctgtttgcaacgccagttgaagggaaaacctttgatgttcaggctgccttagaaaaagataatccgaatgatcttttgatggcgattcgttttgccgccaaccatattttaagccttgatcaattatcgtttgatggcaaagcgcacgagcagcattggtttaataaaaaagaaaccgaaccacgtaaaaaagcctttttgaaaacggcaggcttggtaaaaaaaggctatatgctgtgcggcgcattagctgaagttgagccgtataaccaagaaatcgccttttatgatgccgtacgggcaattttaactaaacgtgaacaaaaaggcacaggcacaaatgaaagacagattttattgaaaaaactggttaatcaaactgtgtattctgaaggcgtgattgatttattcgatctgctagaaaaaccacaaccacaaattagcttactttccgaggaatttttacaaactgtaaaaaatagcccaactaaaaatttatgggttagcgcgatggagcgttatttggcaagtgaaattaaagttaaatcaggcacaaacttaacattgcaaaaagattttgaaaagcgtttgaaggaagcattgaatcaataccacaatcacaatttgactgtggtagagattttggacgaactctttaaaatgagccaagatttccaagaacgtttagcattagggaaaaaactaggattaaccaaggaagaactagccttctatgaagctctatctcaaaatcaaagtgcaaaagatttgatgggtgatgaagtgctttctaaactggcgaaagaaatcacggaaacacttagaaaatcggtcacaatcgactggcagtacaaagaagcggtgcgggcaagaattagattactcgttcgacgtgccttacaaaaatataaatacccgcctgataaacaggaagaagcggtaacttatgtgattaaacaagctgaagaaattgctgaggatttaactggtttataa

SEQ ID NO: 2694 - protein, 1060 aa, Haemophilus influenzae
MLNENDIEQLTLQRLQSLGWEYRYGKDLPVHEGKFARGDLSGVVFVEQLREAVRKLNPQLPESAVDSVVKSATKSDIGDLVVRNQAFYKLLRDGVRVEYQAPNSHGQNEQKIEMARLVDFEHWGNNRFVAVNQLEIRSRKGGKRIPDITGFVNGLPLVVFELKNPLRESADLLQAFNQFETYKDEIAELFVYNQALIISDGIVARLGSLSADFQRFTPWKVVDEKNKSARLYFDDELQSLLNGLLKPKDLLDYIRYFVLFERDSVGKTIKKIAAYHQYYGVNEAVESTIFATSEQGDKRIGVMWHTQGSGKSISMLFYAGKLLAQPELKNPTIVVVTDRNDLDGQLFQTFSSGKDLIKQTPQQVEDRDQLRQLLAQNEVGGVFFTTIQKFALNEEESRFPILNERNNIIVISDEAHRSQYGFTQKLHNGKFQTGYARHLRDALPNASFIGFTGTPISLEDKDTQDVFGRYVSIYDLQDAVEDGATVPIVYEARQIKLAENANHDELFAEIDELLEGEKNPKLRLREKLLGSEARLHDLAVDFVQHFAKRNEVVDSKAMMVVSSRQICVDLYNQIIALHPEWHSDNINEGAIKIVMTGSASDASEMQKHVYSKQEKQTLERRFKDPNDPLKVVIVRDMWLTGFDAPCCNTMYIDKPMQGHNLMQAIARVNRVFRNKSRENGGLIVDYVGIADELEKATRQYTNSQGKGKLADSVIDVFFKMKEHLEVIRSLFATPVEGKTFDVQAALEKDNPNDLLMAIRFAANHILSLDQLSFDGKAHEQHWFNKKETEPRKKAFLKTAGLVKKGYMLCGALAEVEPYNQEIAFYDAVRAILTKREQKGTGTNERQILLKKLVNQTVYSEGVIDLFDLLEKPQPQISLLSEEFLQTVKNSPTKNLWVSAMERYLASEIKVKSGTNLTLQKDFEKRLKEALNQYHNHNLTVVEILDELFKMSQDFQERLALGKKLGLTKEELAFYEALSQNQSAKDLMGDEVLSKLAKEITETLRKSVTIDWQYKEAVRARIRLLVRRALQKYKYPPDKQEEAVTYVIKQAEEIAEDLTGL

SEQ ID NO: 2695 - DNA, 327 bp, Haemophilus influenzae
atggtaggtacagttttttgttattttattgctatctcatttgggattgctatacctattattatggtcaaaatatcacagcttaaagaagaagataaggttatagaattagagcaaaaactacaacgtcttgaaaataaatataaggctgagcaagaacttaaattagcgacattagaaaaaaaacttgttacggaaagaatacgttacgagcgaacaatgcgttccctgaattccattaaagataagcaaataaaacttatccaaaaattagaaaattataaaaataagcttgaacaagatgttgaactaaattatcaacactag

SEQ ID NO: 2696 - protein, 108 aa, Haemophilus influenzae
MVGTVFCYFIAISFGIAIPIIMVKISQLKEEDKVIELEQKLQRLENKYKAEQELKLATLEKKLVTERIRYERTMRSLNSIKDKQIKLIQKLENYKNKLEQDVELNYQH

SEQ ID NO: 2697 - DNA, 345 bp, Haemophilus influenzae
ttggcacccatttttcgtgtttttatatacactttttattatgtcatttatcattgtgccaatttatcttatttattctgttttttttcaaaaaacagtctttcatcaaaagaatgtgaaattaacataaaaatagatgaaatatcaaaaaaaacagaatcacaagaagtaattgaaaaaaaagaagcattagaaaaacaacaagctatttgggatgcagaaattcaacaactcacaaatgaaaataatgaaaggcaagaaaatcttgtctatataaatcaagaaattgcgatgctaacatcaagcatgattccttttccacctaagaatatcaagaataaatag

SEQ ID NO: 2698 - protein, 114 aa, Haemophilus influenzae
MAPIFRVFIYTFYYVIYHCANLSYLFCFFSKNSLSSKECEINIKIDEISKKTESQEVIEKKEALEKQQAIWDAEIQQLTNENNERQENLVYINQEIAMLTSSMIPFPPKNIKNK

SEQ ID NO: 2699 - DNA, 162 bp, Haemophilus influenzae
atgttaatttccagtaagttaagaaaagatgttttagcttatcttgcctcaattaatattgatgcttcaacaatttatcctgatttattaggaaaaataaaactttgtgaaattggcattgataatgcgattgcagagattaatttagaatatcaggattaa

SEQ ID NO: 2700 - protein, 53 aa, Haemophilus influenzae
MLISSKLRKDVLAYLASINIDASTIYPDLLGKIKLCEIGIDNAIAEINLEYQD

SEQ ID NO: 2701 - DNA, 639 bp, Haemophilus influenzae
atggaagattttaaatttataggaaaagataaagtcccagttgttggtgaaatcaatacgttagatgaattcaaaagatttgtttttagttatagttatagttataaatttgatgaagaaacaccagatgaattcaaacaaattcccttagcaagtgatagttcaactaattatgcgagctattatcgtggacatagtaaggttgagtatcgtttggaatctacattagagcgccatttaaagatatttggtaagcaattcaatattgaaaaagattaccaaaaattgcaagaaaaatattttgagcattgcaaacgtattcttatcaatcaaagtattgatggttatattttattaccaagcaatctcaaagatgataatatttgggcatttgcacaacattatcagttaaaaacacctttattagattggacaaaatctttctttgttgcactttattttgcttttgaaagtcaggaagaaaaccaatatcgtgttatttatgaattaaatgagttttttaattttggtgaaaactcattattgagccagaaattaaaattggaaatcggattaatgcacaaaaaggtgtttttacaaaattatcatcgattgaatttgaagatatctccaaactga

SEQ ID NO: 2702 - protein, 212 aa, Haemophilus influenzae
MEDFKFIGKDKVPVVGEINTLDEFKRFVFSYSYSYKFDEETPDEFKQIPLASDSSTNYASYYRGHSKVEYRLESTLERHLKIFGKQFNIEKDYQKLQEKYFEHCKRILINQSIDGYILLPSNLKDDNIWAFAQHYQLKTPLLDWTKSFFVALYFAFESQEENQYRVIYELNEFFNFGENSLLSQKLKLEIGLMHKKVFLQNYHRLNLKISPN

SEQ ID NO: 2703 - DNA, 1401 bp, Haemophilus influenzae
atggcatttaatagcttagccacagataaaaattggcaaaaatactctttggaagaaatttgtttaaaaataacatcaggtggaacacctagtcgacaaaatcctaaattatataaaaacggaaacataaattggattaaaacaaaagaactaaacaatggatacatatttgaatcagaagaaaaaatcacagaagaagccataaagaaatcttctgcaaaattacttcctgtaaataccattcttcttgcaatgtatggagcaacagtcggagagcttggaattttaggaaaagaaatggcttgtaatcaggcttgttgtgcattgattattgatcctaaaaaagccgattatagatttattttctatttactgcgtttatacaaaaaagaaattcaaagtcttgcaacaggggctgcacaacaaaatcttagtgcaaaaacaattaaagaattttctttttatattcctaatttagaaaaacaaaaaaaaatcgcggatatattatctgaattggataaaaaaatagacctcaacacccaaatcaaccaaaccttggaacaaatcgctcaagccctgtttaaaagctggtttgtcgatttcgatcccgtgcgtgccaaagtccaagccctttcagacggccttagccttgaacaagcagagctggcagccatgcaggcaatcagcggaaaaacacccgaagaactgaccgcactttcacaaacacagcctgaccgctacgccgaattagccgaaaccgccaaagcgtttccgtgtgagatggtggaggttgatggggttgaagtgccgaaggggtgggaaattaaagcactacctgaaatcattgattttcttgaaggaccaggcattcgtaattggcaatatacagatgaagaagatggtatcaagtttatcaatattcgctgcatccagaatggagacctgacattaacaaccgcaaataaaatcacgaaggaagaagcttttggaaaatataaacacttccagcttgaagaagacgatattgttgtttcgacatcaggaacattaggacgatttgcttttgttaggaaggaacatttgcctttatcactcaatacaagtgttatccgtttccgtcctattaaaaataaaagcacattaggcttcattgctggttttgttgagaatcaattacaacatgaattggaaatccgagcttcaggttctgcccagcgtaactttggacctacacatttgaaacaaatcaccttattagtacctgatttcaaattacttgaattacatcaaaaatatgtgtcttctttatttgaaaaaagaaaacagcttctatctgaaattgatgtattgaaagatactagagatttgttattacctaaattattaaatggagaaatttaa

SEQ ID NO: 2704 - protein, 466 aa, Haemophilus influenzae
MAFNSLATDKNWQKYSLEEICLKITSGGTPSRQNPKLYKNGNINWIKTKELNNGYIFESEEKITEEAIKKSSAKLLPVNTILLAMYGATVGELGILGKEMACNQACCALIIDPKKADYRFIFYLLRLYKKEIQSLATGAAQQNLSAKTIKEFSFYIPNLEKQKKIADILSELDKKIDLNTQINQTLEQIAQALFKSWFVDFDPVRAKVQALSDGLSLEQAELAAMQAISGKTPEELTALSQTQPDRYAELAETAKAFPCEMVEVDGVEVPKGWEIKALPEIIDFLEGPGIRNWQYTDEEDGIKFINIRCIQNGDLTLTTANKITKEEAFGKYKHFQLEEDDIVVSTSGTLGRFAFVRKEHLPLSLNTSVIRFRPIKNKSTLGFIAGFVENQLQHELEIRASGSAQRNFGPTHLKQITLLVPDFKLLELHQKYVSSLFEKRKQLLSEIDVLKDTRDLLLPKLLNGEI

SEQ ID NO: 2705 - DNA, 1599 bp, Haemophilus influenzae
atgaaaaactttgggcatctgctgatactccgccaacaacttgatgccgctaactataaacatatcgttcttggtcttatcttcttaaaatacatttccgatagtttcacccatcaacaggaaaaaattcaggcggaactttccgatactgaaagcccactctatcttgaccgcactttttttgatactgaagaagaatatcaagatgccttaaccgcagaactagaaaaccgtgattattacaccgcggataacgtattttgggtgccagcttctgcacgttggcaagccttacaagaagtctctattctcaacactggggcagaattgccttggggtggaaaattttctggcgtggcaaaactgattgacgatgccttcgatgccattgaaaaagacaacgaaaaactgaaaggcgtcctccaacgcatcagcggctatgccgtaaacgaagacaccctgcgcgggctgattatcttgttctccgatacccattttacccgcccaacttacaacggcgagcctgtacatttaggtgcaaaagatattctcggccacgtttacgaatacttcctcggtcgctttgcccaagcagaaggcaaacgcggcggacaatatttcacgccgaaatccatcgtttccctgattgtcgaaatgctcgagccctattcaggccgcgtgtatgacccagccatgggcagcggcggctttttcgtgcaaaccgaacgctttatcaccgcccatcaaggcaacatcaacaacgtttccatctacgggcaagaattcaacccaaccacttggaaacttgccgccatgaatatggcgattcgtggcattgattacgacttcggtaaacataacgccgacagtttcacccagccgcaacacatcgacaaaaagatggatttcattatggcaaacccaccattcaatatcagcgattggtggagcgaatcccttgccgatgatccacgttgggcatacggcacaccgcccaaaggcaacgccaacttcgcttggctgcaacacatgatttatcacctctcgcccaacggcaaaatggcattattgcttgccaacggctctatgagcagccaaaccaacaacgaaggcgaaatccgcaaagccatcatcaatgccgacttggtggaatgtatggtcgccctgcctggccagctcttcaccaacacccaaatccccgcctgtatttggtttttaaaccgcaacaaaaaacgtaaaggcgaagtgttgtttatcgatgcccgccaaatcggctatatgaaagaccgagtcttgcgtgatttcaccgctgacgacatcgccaaaattgccgataccctccatgcttggcaaacatcagacggctacgaagaccaagccgctttctgcaaatccgcgactttagaagagattaaaaataacgacttcgtcctcacaccagggcgctacgtcggcactgcagaacaagaagacgacggcgtgccatttgcagaaaaaatgcaaaatctgaccgctcttttgaaggagcaatttgcgaaaagtgcggagttggaagcggagattaagaagaatttggggggattgggttatggcatttaa

SEQ ID NO: 2706 - protein, 532 aa, Haemophilus influenzae
MKNFGHLLILRQQLDAANYKHIVLGLIFLKYISDSFTHQQEKIQAELSDTESPLYLDRTFFDTEEEYQDALTAELENRDYYTADNVFWVPASARWQALQEVSILNTGAELPWGGKFSGVAKLIDDAFDAIEKDNEKLKGVLQRISGYAVNEDTLRGLIILFSDTHFTRPTYNGEPVHLGAKDILGHVYEYFLGRFAQAEGKRGGQYFTPKSIVSLIVEMLEPYSGRVYDPAMGSGGFFVQTERFITAHQGNINNVSIYGQEFNPTTWKLAAMNMAIRGIDYDFGKHNADSFTQPQHIDKKMDFIMANPPFNISDWWSESLADDPRWAYGTPPKGNANFAWLQHMIYHLSPNGKMALLLANGSMSSQTNNEGEIRKAIINADLVECMVALPGQLFTNTQIPACIWFLNRNKKRKGEVLFIDARQIGYMKDRVLRDFTADDIAKIADTLHAWQTSDGYEDQAAFCKSATLEEIKNNDFVLTPGRYVGTAEQEDDGVPFAEKMQNLTALLKEQFAKSAELEAEIKKNLGGLGYGI

SEQ ID NO: 2707 - DNA, 387 bp, Haemophilus influenzae
atggcaagagaatttaaacgtagcgatcgcgtcgctcaagaaatacaaaaagaaatagcagtcattttacaacgcgaagtgaaagatccccgtattgggatggtgacggtttctgatgtggaagtgtcgagtgatttatcttacgcaaaaatctttgtgacttttttattcgatcacgatgaaacggcaattgagcaaggcatgaaaggcttagaaaaagcatcgccttatattcgttcgttactaggtaaagcgatgcgtttacgtatcgtgccagagattcgctttatttacgatcaatccttagtggaagggatgcgtatgtcaaatcttgtgacaaatgttgtgcgtgaagatgagaaaaaacacgttgaggaaagcaactaa

SEQ ID NO: 2708 - protein, 128 aa, Haemophilus influenzae
MAREFKRSDRVAQEIQKEIAVILQREVKDPRIGMVTVSDVEVSSDLSYAKIFVTFLFDHDETAIEQGMKGLEKASPYIRSLLGKAMRLRIVPEIRFIYDQSLVEGMRMSNLVTNVVREDEKKHVEESN

SEQ ID NO: 2709 - DNA, 921 bp, Haemophilus influenzae
atgtctagacctcgtaaacgctggcgtgatgttgatggtgtgtttttgttggataaaccacgaggcatgtcatcaaatgacatcatgcaaaaggtgaagcgtttatttcaagcgaataaagcagggcatactggcgcactcgatccgttggctacgggaatgttgccaatttgcttgggtgaagcaactaagttttcacaatttttgcttgatgccgataagcgttatcttgttacggcaaaattaggcgaacgtaccgatacttccgatgcagaagggcaagtcgtggaaactcgtgaagttcatgttgaaactccgcaaattttgaccgcacttgaacaatttcatggcgatattttgcaagtgccgacaatgttttccgcactaaaacataacggcaaaccgctttatgaatatgcgcgccaaggtattacggttgagcgtgaggcacgtccaattacgatttttgaacttaattttattgaatatcacgcaccttatttaaccttagaagtgcattgttcaaaaggcacttatattcgcactttagtagatgatttgggtgaagtgctaggttgtggcgcgcatgtgacaatgttacgccgtacagccgtagcggattaccccgtagcagaaatgatgccaattgatgagctacaactgctcgctgaaagttttccattaagtgaattggatcgtctattactgccaaccgataccgcagtaagtaaattgcccgctttgcatttggatgcagagcagagtaaagccattggttttggtcagcgagtgaaatttgctaatgaacagcaattaagcggtcaagtgcggttattttcagcggagaatttattcttaggcgtagccttaatcgatgggaatattattcgcccacaacgcttaattacacaatccgcataa

SEQ ID NO: 2710 - protein, 306 aa, Haemophilus influenzae
MSRPRKRWRDVDGVFLLDKPRGMSSNDIMQKVKRLFQANKAGHTGALDPLATGMLPICLGEATKFSQFLLDADKRYLVTAKLGERTDTSDAEGQVVETREVHVETPQILTALEQFHGDILQVPTMFSALKHNGKPLYEYARQGITVEREARPITIFELNFIEYHAPYLTLEVHCSKGTYIRTLVDDLGEVLGCGAHVTMLRRTAVADYPVAEMMPIDELQLLAESFPLSELDRLLLPTDTAVSKLPALHLDAEQSKAIGFGQRVKFANEQQLSGQVRLFSAENLFLGVALIDGNIIRPQRLITQSA

SEQ ID NO: 2711 - DNA, 1125 bp, Haemophilus influenzae
atggaagcccttaaagatttacgttctgaaattgattcgcttgatcgcgaacttatccaactttttgctaaacgtcttgagttggtttctcaagtcggtaaagttaaacatcaacatggattacctatttatgcgccagagcgtgaaatagcaatgctccaagctcgtcgtttagaggctgaaaaagcaggcatttcagccgatttgattgaagatgttctacgccgttttatgcgcgaatcctatgccaatgaaaaccaatttggctttaaaactatcaattctgatattcacaaaattgttatcgtgggcggttatggtaaattaggtggcttatttgcccgttatttacgtgcatctggctatccaatttctattttagatcgcgaagattgggcggtggctgaaagtattttagcgaatgctgatgtcgtgatcgtttccgtccctattaatctcaccttagaaacaattgaacgcctaaaaccttatttaacggaaaacatgctacttgcagatttaacctctgttaagcgagaaccgctagcgaaaatgcttgaagttcattctggtgcagttttaggtttacatccaatgtttggtgcagatattgcaagtatggcaaaacaagtggttgtgcgttgtgatggacgttttcctgaacgttatgaatggttacttgagcaaattcaaatttggggtgcaaaaatttatcaaaccaatgccacagaacacgatcacaatatgacttatatacaagccttgcgccatttttcgacttttgcgaatggtttacacctttccaaacagcccattaatctcgctaatttattggcactttcttcccctatttatcggttagaacttgcgatgattggtcgtttatttgcgcaagatgcagagctttacgccgatattattatggataagtcagaaaatttagcggtaattgaaacgctaaaacaaacttacgacgaagccttaactttctttgaaaataatgatcgtcaaggttttattgatgctttccacaaggtgcatgactggttcggcgattattctgaacaattcttaaaagaaagccgtcagctattgcaacaggcaaatgatttgaaacaagggtag

SEQ ID NO: 2712 - protein, 374 aa, Haemophilus influenzae
MEALKDLRSEIDSLDRELIQLFAKRLELVSQVGKVKHQHGLPIYAPEREIAMLQARRLEAEKAGISADLIEDVLRRFMRESYANENQFGFKTINSDIHKIVIVGGYGKLGGLFARYLRASGYPISILDREDWAVAESILANADVVIVSVPINLTLETIERLKPYLTENMLLADLTSVKREPLAKMLEVHSGAVLGLHPMFGADIASMAKQVVVRCDGRFPERYEWLLEQIQIWGAKIYQTNATEHDHNMTYIQALRHFSTFANGLHLSKQPINLANLLALSSPIYRLELAMIGRLFAQDAELYADIIMDKSENLAVIETLKQTYDEALTFFENNDRQGFIDAFHKVHDWFGDYSEQFLKESRQLLQQANDLKQG

SEQ ID NO: 2713 - DNA, 840 bp, Haemophilus influenzae
atgaattatcaagacaacagcttaaaatccttaaaactcggtcaaaaaacggaatacgcctctcaatatgaccgcactttattacagcctgtgccacgcgcgttaaatcgtgatggattgggcattactcaaaaccaaccatttactatcggcgccgatatttggacggcttatgaaatctcttggctcaacgaaaaaggcttaccacaagtggctatcgcagatatttatctggattatcaaagccaaaatttgattgaatcaaaaagttttaaactttatttaaatagctttaaccaaagcaaatttgccgacttcaacgccgttcaacaaactatgcaacgcgatttaatcgaatgtgctcaaggcgatgtaaaagtgcggttaaatccaatggcagtttatgattctcaaaaaattgatcatttacaaggcgattgcattgatgaacaagatattgaaattactagctacgaattcaacgctgattggctgaaagattgcgtatcggatgaaattgtcgaagaaaaattagtcagccatttattgaaatctaactgcctcattaccaatcagccagactggggcaccttgcatattcactatgttggtaaaaaaatcaatcaggaaaaattattgcgttacgttgtatcgttccgtcagcataatgaattccacgaacaatgtgtcgaacgtattttttgcgatttaatgcactacgcaaaaccagaaaaactcaccgtttacgcacgctatactcgtcgtggcggattagacattaatccattccgctctaattttgagaatttacctgaaaatttaagattggcgagacagtaa

SEQ ID NO: 2714 - protein, 279 aa, Haemophilus influenzae
MNYQDNSLKSLKLGQKTEYASQYDRTLLQPVPRALNRDGLGITQNQPFTIGADIWTAYEISWLNEKGLPQVAIADIYLDYQSQNLIESKSFKLYLNSFNQSKFADFNAVQQTMQRDLIECAQGDVKVRLNPMAVYDSQKIDHLQGDCIDEQDIEITSYEFNADWLKDCVSDEIVEEKLVSHLLKSNCLITNQPDWGTLHIHYVGKKINQEKLLRYVVSFRQHNEFHEQCVERIFCDLMHYAKPEKLTVYARYTRRGGLDINPFRSNFENLPENLRLARQ

SEQ ID NO: 2715 - DNA, 267 bp, Haemophilus influenzae
  misc_feature 9, 10, 11, 12, 13: n is any nucleotide
atggaatgnnnnnagaaatttcggagcacccaagccacgctttcaaaacacggacgatatttagcccaagaaatagaaaaagaaacgggcataccgacttactattatttatatcgtgtaggtgggcaatctttagaatctgaaaaatcccgttgctgcccttcttgtggtgcaaattgggcgttaaaaaatgcgatttttgataccttgtattttaaatgcgatacctgtcgattagtttcgaatctatcgtggaattttttgtaa

SEQ ID NO: 2716 - protein, 88 aa, Haemophilus influenzae
  VARIANT 3, 4, 5: Xaa is any amino acid
MEXXXKFRSTQATLSKHGRYLAQEIEKETGIPTYYYLYRVGGQSLESEKSRCCPSCGANWALKNAIFDTLYFKCDTCRLVSNLSWNFL

SEQ ID NO: 2717 - DNA, 447 bp, Haemophilus influenzae
atgaattatcaagacaacagcttaaaatccttaaaactcggtcaaaaaacggaatacgcctctcaatatgaccgcactttattacagcctgtgccacgcgcgttaaatcgtgatggattgggcattactcaaaaccaaccatttactatcggcgccgatatttggacggcttatgaaatctcttggctcaacgaaaaaggcttaccacaagtggctatcgcagatatttatctggattatcaaagccaaaatttgattgaatcaaaaagttttaaactttatttaaatagctttaaccaaagcaaatttgccgacttcaacgccgttcaacaaactatgcaacgcgatttaatcgaatgtgctcaaggcgatgtaaaagtgcggttaaatccaatggcagtttatgattctcaaaaaattgatcatttaacaaggcgattgcattga

SEQ ID NO: 2718 - protein, 148 aa, Haemophilus influenzae
MNYQDNSLKSLKLGQKTEYASQYDRTLLQPVPRALNRDGLGITQNQPFTIGADIWTAYEISWLNEKGLPQVAIADIYLDYQSQNLIESKSFKLYLNSFNQSKFADFNAVQQTMQRDLIECAQGDVKVRLNPMAVYDSQKIDHLTRRLH

SEQ ID NO: 2719 - DNA, 786 bp, Haemophilus influenzae
atgtatttaatcgaaacctattttcgcctgactgcgctcgaaaataatattgaatcacaaagtcgtttactcaatgcagtgatcgatcaatggcggtataaygggcaaattatcggacgtgaaattcctttatatttagcggaagaagatggcrcacaaggttttgctatgcgtgtcatttgccctgagcaagatagtcttttcccrcaaaataataaygcagaagtgaatcgcgcattacaagaagcmgaaaagtgcggtgtaatttttgatggttttcaacttgtgggygatgatttcaattcagatcaaacagcagaaaatgcgtcgccagcttggcaagtgctttacacaacccatttacaaagttgctcgccgattcatagtggagaaaatttcgcaccaattccgttgtataaacagttgaaaaatcaaccgcacttaagccaagatctgattaaatggcaagaaaattggcaagcctgcgatcaactacaaatgaatggtgcggtattagaacaacaatctttggcagaaatttcggagcaccaaagcacgctttcaaaacacggacgatatttagcccaagaaatagaaaaagaaacgggcataccgacttactattatttatatcgtgtaggtgggcaatctttagaatctgaaaaatcccgttgctgcccttcttgtggtgcaaattgggcgttaaaaaatgcgatttttgataccttgtattttaaatgcgatacctgtcgattagtttcgaatctatcgtggaattttttgtaa

SEQ ID NO: 2720 - protein, 261 aa, Haemophilus influenzae
  VARIANT 52: Xaa is any amino acid
MYLIETYFRLTALENNIESQSRLLNAVIDQWRYNGQIIGREIPLYLAEEDGXQGFAMRVICPEQDSLFPQNNNAEVNRALQEAEKCGVIFDGFQLVGDDFNSDQTAENASPAWQVLYTTHLQSCSPIHSGENFAPIPLYKQLKNQPHLSQDLIKWQENWQACDQLQMNGAVLEQQSLAEISEHQSTLSKHGRYLAQEIEKETGIPTYYYLYRVGGQSLESEKSRCCPSCGANWALKNAIFDTLYFKCDTCRLVSNLSWNFL

SEQ ID NO: 2721 - DNA, 381 bp, Haemophilus influenzae
atgatagaacaattaaaacaagctaaaaattgggaagatcgctatcgcctgattattcaagcaggcaaaaatttacctcgcccaagcgataatgaactcgctcaaatgcaacctattactggctgcgaagcacaaatgtggtttcaaattatgcctaaacatgaccgcacttttcaattcagcggatttagcgaagccagaattatgaatggcttgctttggattttattcaataaaatcaatggtaaaacagcggatgaattgaatacatttgatattaytgymttttttagcgaactcggcatttcacaacgtttaagtgaaatgcgtttaaacggcttaaaccaaatcggacagcaattaaaaaatttatgtatttaa

SEQ ID NO: 2722 - protein, 126 aa, Haemophilus influenzae
  VARIANT 94, 95: Xaa is any amino acid
MIEQLKQAKNWEDRYRLIIQAGKNLPRPSDNELAQMQPITGCEAQMWFQIMPKHDRTFQFSGFSEARIMNGLLWILFNKINGKTADELNTFDIXXFFSELGISQRLSEMRLNGLNQIGQQLKNLCI

SEQ ID NO: 2723 - DNA, 465 bp, Haemophilus influenzae
  misc_feature 439, 440, 441, 442, 443: n is any nucleotide
atgtatttaatcgaaacctattttcgcctgactgcgctcgaaaataatattgaatcacaaagtcgtttactcaatgcagtgatcgatcaatggcggtataacgggcaaattatcggacgtgaaattcctttatatttagcggaagaagatggcacacaaggttttgctatgcgtgtcatttgccctgagcaagatagtcttttcccgcaaaataataatgcagaagtgaatcgcgcattacaagaagcagaaaagtgcggtgtaatttttgatggttttcaacttgtgggcgatgatttcaattcagatcaaacagcagaaaatgcgtcgccagcttggcaagtgctttacacaacccatttacaaagttgctcgccgattcatagtggagaaaatttcgcaccaattccgttgtataaacagttgaaaaatcaaccgnnnnncattcattcattaattaattaa

SEQ ID NO: 2724 - protein, 154 aa, Haemophilus influenzae
  VARIANT 147, 148: Xaa is any amino acid
MYLIETYFRLTALENNIESQSRLLNAVIDQWRYNGQIIGREIPLYLAEEDGTQGFAMRVICPEQDSLFPQNNNAEVNRALQEAEKCGVIFDGFQLVGDDFNSDQTAENASPAWQVLYTTHLQSCSPIHSGENFAPIPLYKQLKNQPXXIHSLIN

SEQ ID NO: 2725 - DNA, 381 bp, Haemophilus influenzae
atgatagaacaattaaaacaagctaaaaattgggaagatcgctatcgcctaattattcaagcaggcaaaaatttacctcgcccaagcgataatgaactcgctcaaatgcaacctattactggctgcgaagcacaaatgtggtttcaaattatgcctaaacatgaccgcacttttcaattcagcggatttagcgaagccagaattatgaatggcttactttggattttattcaataaaatcaatggtaaaacagcggatgaattgaatacatttgatattattgccttttttagcgaactcggcatttcacaacgtttaagtgaaatgcgtttaaacggcttaaaccaaatcggacagcaattaaaaaatttatgtatttaa

SEQ ID NO: 2726 - protein, 126 aa, Haemophilus influenzae
MIEQLKQAKNWEDRYRLIIQAGKNLPRPSDNELAQMQPITGCEAQMWFQIMPKHDRTFQFSGFSEARIMNGLLWILFNKINGKTADELNTFDIIAFFSELGISQRLSEMRLNGLNQIGQQLKNLCI

SEQ ID NO: 2727 - DNA, 1200 bp, Haemophilus influenzae
atggcttttgattatcaaacgttccgtcaagaatttccctatttccaacgtgaagatgcggttatttatttagataacgccgccaccgcgttgaaacctcaagtgttaattgatcgcaccgctgaattttatgcgtctgcaggttcggtgcatcgcagccaatatgatgctgcccaaactgcgcaatatgaacaggctcgcacacaggttaaagaatgggttcatgcagaagataaacacgctgttatttggacttcgggtacaactcacgcaataaacttagtggcaaatggattgctaccgcaattaaacgccgaagatgaaattctgattagccaagcagatcatcatgctaattttgtcacttggcatgaaacggcgaaaaagtgcggtgcaaaaattcgagttttaccgattttagataattggctaattgatgaaaatgtgcttatttctaccctttctgaaaaaacaaaactcgttgcgctgaattttgtttcaaatgtcacaggcacagaacagccgattaaacgcctgattcaactggttagaaaacatagtcatgcgttggttttagtagatgcagcacaggcgattagtcatatcaaaattgatttacaagatttagatgccgattttctcgcattttctgcccataaaatttatggcccaaatggacttggcgttttaacaggaaaattaaccgcactttctcaacttcaaccgctctttttcggtggaaaaatggttgagcgtgtgtcaaataatcgtattacttttgccgaattaccttatcgtttagaagctggcacacccaatattgctggggttattggctttaatgcggtgctggattggctacaaaaatgggattttaccacagcagaacagcacgctatatctttggctgaatccgtcaaagtgcggttaaaatcttacgagaattgccgattattcgattctcctcaaccaagcaccgttgtttgctttatatttgacggcattgactgttctgatctttctacacttttgagcgaacaaaatattgcacttcgtgtgggcgaacattgtgcccagccttatttagcacgcttaggcgaacgcaccacattacgcctttcttttgccccttataatacgcaggaagatgtagaggcattcttcaccgccttagataaagcactggatttattacaatga

SEQ ID NO: 2728 - protein, 399 aa, Haemophilus influenzae
MAFDYQTFRQEFPYFQREDAVIYLDNAATALKPQVLIDRTAEFYASAGSVHRSQYDAAQTAQYEQARTQVKEWVHAEDKHAVIWTSGTTHAINLVANGLLPQLNAEDEILISQADHHANFVTWHETAKKCGAKIRVLPILDNWLIDENVLISTLSEKTKLVALNFVSNVTGTEQPIKRLIQLVRKHSHALVLVDAAQAISHIKIDLQDLDADFLAFSAHKIYGPNGLGVLTGKLTALSQLQPLFFGGKMVERVSNNRITFAELPYRLEAGTPNIAGVIGFNAVLDWLQKWDFTTAEQHAISLAESVKVRLKSYENCRLFDSPQPSTVVCFIFDGIDCSDLSTLLSEQNIALRVGEHCAQPYLARLGERTTLRLSFAPYNTQEDVEAFFTALDKALDLLQ

SEQ ID NO: 2729 - DNA, 495 bp, Haemophilus influenzae
atgataaatcgaaaaatactattgacgagtttattacttatttttaccgtactttctgcttgttctcgcgaaaaaaatacgtgtcgtgtggttaaaattagtgatggcgatacgctcacttgcctcactaaaggcaataaatccattaaagttcgtttagccgaaattgatgcgccagaaaaatctcaagcctttgggcaaaaatcgaaaaaaaccttgtctgatctggtttatcaaaaaaacgtacgtctttcactaaaaggaaaagatcgctatcaacgaaccttggcgattgtttattatcaagataaaaatattaatttagaaatggttaaacagggtatggcatgggcttataagcaatattcccatgatccgatttatcttcaagcgcaagaaaatgcacaagccaaaggaattggtctttgggcagataataatccgattgaaccaagtcaatggcgcagacaagagaaaaatcaatatggcttttga

SEQ ID NO: 2730 - protein, 164 aa, Haemophilus influenzae
MINRKILLTSLLLIFTVLSACSREKNTCRVVKISDGDTLTCLTKGNKSIKVRLAEIDAPEKSQAFGQKSKKTLSDLVYQKNVRLSLKGKDRYQRTLAIVYYQDKNINLEMVKQGMAWAYKQYSHDPIYLQAQENAQAKGIGLWADNNPIEPSQWRRQEKNQYGF

SEQ ID NO: 2731 - DNA, 423 bp, Haemophilus influenzae
atgattcaaaaattatttttattagttcgttcgttggtcattttatctattatgttatatctcggaaatcttattgcttattacattccatcaggtgttccaggaagtatttggggattgttattgctctttttaggtttaacaacacgagtgattcatttaaattggatttatttaggcgcaagtttgctaattcgttttatggcggtactttttgtaccagtgagcgtgggaattatcaaatattctgatttattgatagagcaaattaatattttgcttgttcccaatattgtgagtacttgtgtcactttacttgttataggatttttaggtcattatttgtatcagatgcaatcttttacacataaacgcaaaaaagtaataaaacgtagagaaaatcaggtaaaacaagcgaattag

SEQ ID NO: 2732 - protein, 140 aa, Haemophilus influenzae
MIQKLFLLVRSLVILSIMLYLGNLIAYYIPSGVPGSIWGLLLLFLGLTTRVIHLNWIYLGASLLIRFMAVLFVPVSVGIIKYSDLLIEQINILLVPNIVSTCVTLLVIGFLGHYLYQMQSFTHKRKKVIKRRENQVKQAN

SEQ ID NO: 2733 - DNA, 696 bp, Haemophilus influenzae
atgcagcagtacattatttatctttatacatttttaacaattttcgggttttggctcgcactacaaattagcaaacgttggaagtcaatgatttttaatacttttgttttaacagtattaattttggcggcgattttagtgataggaaagattccttatgatgattatatggcaggaaatgcgcctattaataatttacttggcttgagtatcgttgctctcgcattgcctctttatgaacaacttcgccaaattgccagacaatggaaaattattctttcaacggtggttatagcctcttttttggcgatgttaagtggcgggcttttagcatttcttttaggctcaacgcccgaaatggtcgctacggttttacctaaatccatcacaatgcctattgcgatggaagtttctcgtcatttaggcggcattcctgccgtaactgcagttggtgttgtggttgcaggtttgcaaggatcgatatttggttatcttgtattaaaaaagttgggtgttaaacatcaagaagctattgggctttctgttggttcggtttctcacgcgctcggtacagtaagttgtatggaaacgaatccaacagcgggaagttacagttctatttctcttgtgctttgtgggattattagttctattctcgcgccatttgtatttaagctgatttatttctttgtttaa

SEQ ID NO: 2734 - protein, 231 aa, Haemophilus influenzae
MQQYIIYLYTFLTIFGFWLALQISKRWKSMIFNTFVLTVLILAAILVIGKIPYDDYMAGNAPINNLLGLSIVALALPLYEQLRQIARQWKIILSTVVIASFLAMLSGGLLAFLLGSTPEMVATVLPKSITMPIAMEVSRHLGGIPAVTAVGVVVAGLQGSIFGYLVLKKLGVKHQEAIGLSVGSVSHALGTVSCMETNPTAGSYSSISLVLCGIISSILAPFVFKLIYFFV

SEQ ID NO: 2735 - DNA, 1389 bp, Haemophilus influenzae
atgcagaaaaacgaaataaaacaaagcgatatgaaaccacttatcattgattcttcttggacagaacgttttcttcctgatcctccacgtgaaaaagataatcgcccaccatttcgtcgtgatcgtgggcgaattttacattctgccgcctttcgttgcttgcaagcgaaaacccaaattcatgcgattggcgaaaatgatttttatcgcactcgcttaacccattctttggaagtggctcagattggcagtagtcttgttgcacagcttaaatttttagaaacttttgaaagcctttcgcaaacattaaatattgataaaaacgagttgcaaaaacaattaaaacctttattgccgagtaacgatcttattgagagtttgtgttttgcacatgatatagggcatccaccttttgggcatggtggcgaaacggcattaaattatatgatggcagagcagggcggttttgaaggcaatgcgcaaacctttagaattttaacaaaacttgagccttacactgaaaatgcagggatgaatctaacacgtagaacactattgggtgtcgtgaaatatcccgcattgttagatgtggcttcgcctcaatatgcagaacttaatttttctcgcaatattgatcctcgttttgtgcgtattcacgattggattccaggaaaaggcattttccgtgatgatttaaaaatgtttaattggttgctggaaaatctttctgaaaatgaccgcactttattctgtcaatttaaaaaagtgcgggaaaatccagctgaatctttacatactcggtttaaatcactggattgcagcattatggaattggcggatgatattgcctatggcgtgcatgatttagaagatgccattgtgactggcatggtaaatcctcatcaatggcaagcggcacattctgcattgaaacaaattccatcagcttggttgcatgaaaatattgattctattagccaacgacttttctctgataaacattttgaacgaaaacaagccattggcgcattggtgaacttttttattactaatgtgcggtggaaattaacggcaaattttgatgaacctttgttacgttataacgcagagttgtcacctgaagtgattgctgcacttggtgtatttaaaaaattcgtttgggattatgttattcgcaatgtggatactcaacgaatcgaatataaagggcagagaatgctaacagaaatgttccaaatttttgaatctgatccagagcgtttattacctcgaaatactgcaaatcgttggcgtaatgcccctgaagaaaggaagaagcggattatttgcgattatattgcaggcatgtcggatgcacacgcattgcgggtatcaacaactttgatttaa

SEQ ID NO: 2736 - protein, 462 aa, Haemophilus influenzae
MQKNEIKQSDMKPLIIDSSWTERFLPDPPREKDNRPPFRRDRGRILHSAAFRCLQAKTQIHAIGENDFYRTRLTHSLEVAQIGSSLVAQLKFLETFESLSQTLNIDKNELQKQLKPLLPSNDLIESLCFAHDIGHPPFGHGGETALNYMMAEQGGFEGNAQTFRILTKLEPYTENAGMNLTRRTLLGVVKYPALLDVASPQYAELNFSRNIDPRFVRIHDWIPGKGIFRDDLKMFNWLLENLSENDRTLFCQFKKVRENPAESLHTRFKSLDCSIMELADDIAYGVHDLEDAIVTGMVNPHQWQAAHSALKQIPSAWLHENIDSISQRLFSDKHFERKQAIGALVNFFITNVRWKLTANFDEPLLRYNAELSPEVIAALGVFKKFVWDYVIRNVDTQRIEYKGQRMLTEMFQIFESDPERLLPRNTANRWRNAPEERKKRIICDYIAGMSDAHALRVSTTLI

SEQ ID NO: 2737 - DNA, 99 bp, Haemophilus influenzae
atgccacaactgccccataaaaattcagtgaaaattaaccgcactattttatacggtttgcataaaaaatcccatcaattcgatgggattctctcttaa

SEQ ID NO: 2738 - protein, 32 aa, Haemophilus influenzae
MPQLPHKNSVKINRTILYGLHKKSHQFDGILS

SEQ ID NO: 2739 - DNA, 1944 bp, Haemophilus influenzae
gtggcattaattagtttaaccaatggatatctttcctttagtgatgcacctttgttagatcacgcagaactacatattgaaccgaatgaacgtgtttgtttagttgggcgtaacggtgcaggtaaatcaactttattgaaaatcatcgcaggcgatgtgcttatggatgatggcaaaatccaatacgaaaaagatcttgtggtttctcgtttagaacaagacccaccgcgtaatgcacaaggcaatatttttgattatgtcgcggaaggcgtagggcatttaacggatttattgaaagaatatcatcagatttctgttcaattggaagaaaattacagtgatcaaattttaagtcaattagagcaagttcaggctaaattagaacacgctgatggctggcgatttgaaaataaaatcaatgaagtattgttaaaactaggtttaaatccaaacacaaaattatccgcactttcaggcggttggttacgcaaagcggcattcgcacgtgcattggtgtgcgatcctgatgtgttattactcgatgaaccaaccaaccacttggatgtggaagctattgaatggctggaaaatttcttactggatttccaaggtagcattgtatttatttcccatgaccgttcttttattcgcaaaatggcaacacgtattgtggatttagatcgcggtcaattgcagtcttatctaggcaattacgatttatatttaaccacgaaagaagaaaatctacgcgttgaagccttgcagaatgaattatttgataaacgtctagcacaggaagaagtgtggattcgccaaggtatcaaggctcgccgtacaagaaatgaagggcgagtgcgagcattaaaagcgatgcgtgaggaacgccgccaacgccgtgatgtaatgggaacagccaaattacagttagatacctcaagtcgttcaggcaaaattgtctttgaaatggaaaatgttagctatgaagtcacaggaaaaactttgttaaaagatttttcaacaacgattttacgtggagacaaaattgcccttgttgggccaaatggctgtgggaaaaccacgttcattaaattattgttgggggaaattcagccaacatcaggaaaaatccgttgtggtactaaattagagattgcttattttgaccaataccgtgctgatttagatcctgaaaaaaccgtaatggataatgtggcagatggtaaacaagatattgaaatcaatggtgtaaaacgtcatgtgctagggtatttgcaagatttcttgttcccaccaaaacgtgcaatgaccccagttaaagccttatcggggggagaacgaaatcgtttattactcgcaaaattgttactcaaaccaaataatttattgattcttgacgaaccaaccaatgaccttgatgtagaaacattggagcttttagaagaaattttgactgattatcaaggcacattgttaattgtgagccatgaccgtcaatttatcgataatactgcgacagaatgttatttattcgaaggtgaagggcatttgaataagtatgtgggaggattctttgatgcgaaacagcaacaagccaatttttgggcaagcaaagcggtggaagaacaggctaaggcgaagaaatctgaaccactaaaagaagaaagtgcggtgaaaaatgaccgcacttctaagccgaaatccgtgaaactttcttataaagaacaacgtgagttagaacagctgccacaacttttggaagagttggaaaccaaaatcaccacactgcaagctgaaatagccgatccagcatttttccaacaagctcacgatattaccgacgctaaattaaaagaattggcggatactgaagccgaattagaaacagcatttttacgctgggaagaattagaagaaaagaaaaatttggctgacggtaaatcttaa

SEQ ID NO: 2740 - protein, 647 aa, Haemophilus influenzae
MALISLTNGYLSFSDAPLLDHAELHIEPNERVCLVGRNGAGKSTLLKIIAGDVLMDDGKIQYEKDLVVSRLEQDPPRNAQGNIFDYVAEGVGHLTDLLKEYHQISVQLEENYSDQILSQLEQVQAKLEHADGWRFENKINEVLLKLGLNPNTKLSALSGGWLRKAAFARALVCDPDVLLLDEPTNHLDVEAIEWLENFLLDFQGSIVFISHDRSFIRKMATRIVDLDRGQLQSYLGNYDLYLTTKEENLRVEALQNELFDKRLAQEEVWIRQGIKARRTRNEGRVRALKAMREERRQRRDVMGTAKLQLDTSSRSGKIVFEMENVSYEVTGKTLLKDFSTTILRGDKIALVGPNGCGKTTFIKLLLGEIQPTSGKIRCGTKLEIAYFDQYRADLDPEKTVMDNVADGKQDIEINGVKRHVLGYLQDFLFPPKRAMTPVKALSGGERNRLLLAKLLLKPNNLLILDEPTNDLDVETLELLEEILTDYQGTLLIVSHDRQFIDNTATECYLFEGEGHLNKYVGGFFDAKQQQANFWASKAVEEQAKAKKSEPLKEESAVKNDRTSKPKSVKLSYKEQRELEQLPQLLEELETKITTLQAEIADPAFFQQAHDITDAKLKELADTEAELETAFLRWEELEEKKNLADGKS

SEQ ID NO: 2741 - DNA, 690 bp, Haemophilus influenzae
atggataaaattaaacaactctttgccaacaattacagttgggcgcaaagaatgaaagaagaaaattctacttacttcaaagaacttgcggatcatcaaacgccacattacctttggattggttgctctgatagccgtgtgcctgctgaaaaattgacaaatcttgaaccgggcgagctttttgtacaccgtaatgttgctaaccaagtaattcacacagattttaattgcctttctgttgtgcaatatgccgtcgatgtgcttaaaattgaacatattattatctgtggtcacaccaactgcggaggaattcacgctgctatggcagataaagatttagggcttatcaacaactggcttcttcatattcgtgatatttggtttaaacacggtcatcttctcggtaaactttctccagaaaaacgtgccgatatgctaactaaaattaacgtagcggaacaggtttacaatctagggcgcacatcaattgtaaaaagtgcttgggaacgcggacaaaaactctcattacacggctgggtatatgatgtaaatgatggatttttagtggatcaaggcgtaatggcaaccagcagagaaacccttgaaatttcttatcgaaacgctatcgctcgtttatcaatacttgatgaagaaaatattttgaaaaaagatcatcttgaaaatacataa

SEQ ID NO: 2742 - protein, 229 aa, Haemophilus influenzae
MDKIKQLFANNYSWAQRMKEENSTYFKELADHQTPHYLWIGCSDSRVPAEKLTNLEPGELFVHRNVANQVIHTDFNCLSVVQYAVDVLKIEHIIICGHTNCGGIHAAMADKDLGLINNWLLHIRDIWFKHGHLLGKLSPEKRADMLTKINVAEQVYNLGRTSIVKSAWERGQKLSLHGWVYDVNDGFLVDQGVMATSRETLEISYRNAIARLSILDEENILKKDHLENT

SEQ ID NO: 2743 - DNA, 1404 bp, Haemophilus influenzae
atgtctaaagtggcatcaattgttgatgtattacaagggaaagtggcgattggtgaaagcgtcactgtgcgtggttgggttcgtacccgtcgcgattctaaagcaggcttatctttcttagcggtttatgacggttcttgctttgatccaattcaagcaattattaataacgatattgaaaattacgaaagcgaaattttacgtttaacaacaggctgttctgtgattgtaacgggtaaagtcgttgaatcaccttcagaaggacaagcggttgaattacaagcagaaaaagtggaagtgacagggtttgttgaagatccagatacttacccaatggcagcaaaacgccactctatcgaatatttacgcgaagtagctcacttacgccctcgtaccaatattattggtgcagttgcacgtgttcgccattgtttatctcaagcaattcaccgtttcttccacgaacaaggtttctactgggtggcaaccccattaattacggcatcagacactgaaggtgcgggtgaaatgtttcgtgtttctacacttgatttagaaaatcttccacgtagtgaaaatggaaaagttgatttcagccaagatttcttcggtaaagaatcatttttaacggtttcaggtcagttaaacggcgaaacctatgcttgtgcattaagcaaaatttatacttttggcccaacattccgtgcagaaaactcgaataccacccgtcacttagcggaattctggatggttgaacccgaagttgcatttgcaaccttagcggataacgcaaaacttgcagaagatatgttgaaatacgtatttcgtgcagtattagcagagcgtaaagacgacttacaattctttgaaaaacatgtagataaagatgttattactcgtttagaaaactttgtaaactcagattttgcgcaaattaactataccgatgccattgatgtgttattaaaatctggtaaaaaatttgaattccctgtttcttggggtatcgatctttcttctgaacacgaacgtttcttagcggaagaatatttcaaatcaccagttgtggtaaaaaactatccaaaagacattaaagcattctatatgcgtttaaatgatgatgaaaaaactgtggcggcaatggacgtattagctccaggaattggtgaaatcatcggtggttcacaacgtgaagaacgtttagaggtgcttgataaacgcatggaagaaatgggattaaatccagatgattattggtggtatcgcgatctgcgtaaatacggcagcgttccacattctggttttggtcttggttttgaacgcttaatcgtctacgtaactggcgtgcaaaatattcgtgatgtaattccattcccacgcgcaccaagaaatgcgaatttctaa

SEQ ID NO: 2744 - protein, 467 aa, Haemophilus influenzae
MSKVASIVDVLQGKVAIGESVTVRGWVRTRRDSKAGLSFLAVYDGSCFDPIQAIINNDIENYESEILRLTTGCSVIVTGKVVESPSEGQAVELQAEKVEVTGFVEDPDTYPMAAKRHSIEYLREVAHLRPRTNIIGAVARVRHCLSQAIHRFFHEQGFYWVATPLITASDTEGAGEMFRVSTLDLENLPRSENGKVDFSQDFFGKESFLTVSGQLNGETYACALSKIYTFGPTFRAENSNTTRHLAEFWMVEPEVAFATLADNAKLAEDMLKYVFRAVLAERKDDLQFFEKHVDKDVITRLENFVNSDFAQINYTDAIDVLLKSGKKFEFPVSWGIDLSSEHERFLAEEYFKSPVVVKNYPKDIKAFYMRLNDDEKTVAAMDVLAPGIGEIIGGSQREERLEVLDKRMEEMGLNPDDYWWYRDLRKYGSVPHSGFGLGFERLIVYVTGVQNIRDVIPFPRAPRNANF

SEQ ID NO: 2745 - DNA, 474 bp, Haemophilus influenzae
atgaaagttttagaaggctcagtcgcagcacctaatgcaaaagttgccgtagcaattgctcgttttaacagttttattaatgaaagtttattagaaggtgcaattgacgcattaaaacgtattggccaagtgaaagatgaaaatatcactatcgtgcgtgccccaggcgcgtatgagttgccattagttgctcgtcgtttagctgaaagtaaaaaatttgatgcgattgtggcattaggtacagttatccgtggtggtacagcgcactttgaatatgtagcaggagaagcaagcagcggtttaggaaaagttgcaatggatgctgaaatccctgtcgcttttggtgtattaaccacagaaaatattgaacaggcgattgaacgtgctggtactaaagcgggtaataaaggtgcagaagcagccttaaccgcacttgaaatggttaatcttattcaacaaattgatgcggcataa

SEQ ID NO: 2746 - protein, 157 aa, Haemophilus influenzae
MKVLEGSVAAPNAKVAVAIARFNSFINESLLEGAIDALKRIGQVKDENITIVRAPGAYELPLVARRLAESKKFDAIVALGTVIRGGTAHFEYVAGEASSGLGKVAMDAEIPVAFGVLTTENIEQAIERAGTKAGNKGAEAALTALEMVNLIQQIDAA

SEQ ID NO: 2747 - DNA, 435 bp, Haemophilus influenzae
atgacagaacaaaaacaagtgaaaaagccttctgctcgtcgtcgtgcgcgtgaatgtactgttcaagccttgtattcttgggcagtatccggcaatactgcagaacaagtggaattagcctttgtgttagatcaagatatggaaggggtagataaaccttacttccgtaaattatttcgtcaaacaatagaaaatattgaaaccgttgatttttcaatttcgccttatattgaccgcgcttttgatgagcttgatcctattgaaacggcaattttacgtttggctgtttatgaattgcgctttgaattagatgtgccatataaagtggttatcaatgaagcgattgaagtggcaaaagtattcggtgcagatgaaagccataaatatatcaatggcgtacttgataaaatcgcaccagcattagggcgtaaataa

SEQ ID NO: 2748 - protein, 144 aa, Haemophilus influenzae
MTEQKQVKKPSARRRARECTVQALYSWAVSGNTAEQVELAFVLDQDMEGVDKPYFRKLFRQTIENIETVDFSISPYIDRAFDELDPIETAILRLAVYELRFELDVPYKVVINEAIEVAKVFGADESHKYINGVLDKIAPALGRK

SEQ ID NO: 2749 - DNA, 987 bp, Haemophilus influenzae
atggcaatgggtgaatttgatttaattaaacgatattttcagcaacaaatattagttgatgattccgttcaattatctattggcgacgattgtgcgctggtttccgtgccagagaattatcagcttggcattacgaccgatacaatggtagaaaatacgcattttttaccaaccattttacctacggacttggcttataaggcggttgcaacaaatttaagtgatcttgctgcaatgggggcacagccaaaatgggtttcactggcattaactttgccaaatgtagacgaaaattggatttcaacatttagccaaagtttattgcacacgttaaaaaaatacaacgtcacattaattggtggcgatactacaaaaggtaatttgtctattacgattacggcacaaggttttgtcgaaaaaaacaaaggaatttgtcggcataaagcacaaatcggtgatttaatttatgtttcaggcactttaggcgatagcgcagcaggtttaacacaaattttattgggcaaaagtgcggttgattctgatgatgtttttttgcaacaacgacatcttagacccacacctagaattgaacttgggcgggcgttaattgatattgctcacgctgccattgatctttccgatgggctaatatctgatttagggcatattcttgaacgaagtcaatgttgtgctgaagttgaactgactgcattacctctttcatcatcgattttaaataaatatgatcgcactcaagcggaacaatttgccttaagtggtggagaagattatgaactctgttttactataccgcccaaatctaaagatgaattagaattacgcttgaaaaaactgaacgtgccttgtacttgcattggtaaaatcactgaaaagtgcggtgacttttctccccgttttttacgggatggaaaacctgtgaatataactttttcaagcggtttcgatcattttaaggaatcaaaatga

SEQ ID NO: 2750 - protein, 328 aa, Haemophilus influenzae
MAMGEFDLIKRYFQQQILVDDSVQLSIGDDCALVSVPENYQLGITTDTMVENTHFLPTILPTDLAYKAVATNLSDLAAMGAQPKWVSLALTLPNVDENWISTFSQSLLHTLKKYNVTLIGGDTTKGNLSITITAQGFVEKNKGICRHKAQIGDLIYVSGTLGDSAAGLTQILLGKSAVDSDDVFLQQRHLRPTPRIELGRALIDIAHAAIDLSDGLISDLGHILERSQCCAEVELTALPLSSSILNKYDRTQAEQFALSGGEDYELCFTIPPKSKDELELRLKKLNVPCTCIGKITEKCGDFSPRFLRDGKPVNITFSSGFDHFKESK

SEQ ID NO: 2751 - DNA, 492 bp, Haemophilus influenzae
atgacagaaaataatcctcttaaaaaaatctctcttttaaatcctattcatttacttgccgttggttttggctcgggtttaatttatccagcacctggcacgtgggggagcttagctggaacaattttaggcgtgattttgctttctttgttaggtgtaaaaatctttttaattttcaccgcactttgttttctactcggttgctacctttgccaaaaaactactgcagatatgggcgtgcacgatcatggttctatcgtctgggatgaatttgtcggcgtatttattgtattagcagcgataccgtcattatcttggcaatggattttggctgcttttgcgttatttcgctttttcgatattttaaaaccgtttccaattcgttattttgacgaaaaactcgaaaatggttttggcattatgatcgatgacgttttagcggcaatttatgccgtgattgtcgtatttgcaattcagtattggatgttgtga

SEQ ID NO: 2752 - protein, 163 aa, Haemophilus influenzae
MTENNPLKKISLLNPIHLLAVGFGSGLIYPAPGTWGSLAGTILGVILLSLLGVKIFLIFTALCFLLGCYLCQKTTADMGVHDHGSIVWDEFVGVFIVLAAIPSLSWQWILAAFALFRFFDILKPFPIRYFDEKLENGFGIMIDDVLAAIYAVIVVFAIQYWML

SEQ ID NO: 2753 - DNA, 630 bp, Haemophilus influenzae
atgctgaatttaatcattgtgcatttatttggattaatgacgccaggccctgatttcttctatgtaagtcggatggcggcaagtaactctcgtcgtaatacagtttgtggcattttaggcataacgcttggtatcgctttttggggaatgctttctatgttgggattagcggtgttgttcgttaccattccagcattacatggcgttattatgttgctaggcggtagttacttagcatatctcggttttttaatggctcgcagcaaaaaatacgctaaatttgaaccgcactctgatactgaatttaatcagcaaaccacaatcaaaaaagaaattttgaaagggcttttagtgaatttatccaatgcaaaagtcgtggtgtattttagtagcgtgatgtcgcttgtcttagtaaatatcactgaaatgtggcaaattatcttggcttttgcagtgattgtggtagaaacattttgttatttttatgtgatttcattgattttttcacgtaatattaccaagcgtttatacagtcaatacagccgttatattgataatatggcaggtattgtatttttattttttggttgtgcgcttgtttataacggcatcaacgaaataattcattaa

SEQ ID NO: 2754 - protein, 209 aa, Haemophilus influenzae
MLNLIIVHLFGLMTPGPDFFYVSRMAASNSRRNTVCGILGITLGIAFWGMLSMLGLAVLFVTIPALHGVIMLLGGSYLAYLGFLMARSKKYAKFEPHSDTEFNQQTTIKKEILKGLLVNLSNAKVVVYFSSVMSLVLVNITEMWQIILAFAVIVVETFCYFYVISLIFSRNITKRLYSQYSRYIDNMAGIVFLFFGCALVYNGINEIIH

SEQ ID NO: 2755 - DNA, 813 bp, Haemophilus influenzae
atgacattaaaaattgcaatcgctggtgctggcggaagaatggggcgtcaattaattcaagcggttcattctgcggaaggcgtagaactaggtgcagcttttgaacgcaaaggatcatctttagttgggacggatgcgggagaattggcgggaattggtcatcttggcgttgcagtttcagacgatcttgaaagtcaaaaagataaattcgatttattaatcgattttacccgaccagaaggcacccttgaacatattgcattttgcgtagcgaataataaaaaaatggtgatcggtacaacgggttttgatgaaaatggtaaagcagcgattaaagcagcttcagataaaattgctattgtgtttgcatcaaatttcagtgttggcgtgaatttagtcttcaagcttttagaaaaagcagcaaaagtgatgggggattattgcgatattgaagtgatcgaagcgcatcaccgccataaagttgatgcgccatctggcactgcactttctatgggcgaacatatcgcaaaaaccttaggtcgcgatttaaaaacgcacggagtcttctgccgtgaaggaatcacaggcgaacgtaaacgcgatgaaattggtttttcaactattcgtgcttcggatgtggtgggggaacactcggtttggtttgcagatattggcgaacgtgtagaaatttcccataaagcatcaagccgaatgactttcgctaatggtgcagtgcgtgctggtaaatggttagaaaataaggcgaatggcttatttgatatgaccgatgtattagatttaaataatttataa

SEQ ID NO: 2756 - protein, 270 aa, Haemophilus influenzae
MTLKIAIAGAGGRMGRQLIQAVHSAEGVELGAAFERKGSSLVGTDAGELAGIGHLGVAVSDDLESQKDKFDLLIDFTRPEGTLEHIAFCVANNKKMVIGTTGFDENGKAAIKAASDKIAIVFASNFSVGVNLVFKLLEKAAKVMGDYCDIEVIEAHHRHKVDAPSGTALSMGEHIAKTLGRDLKTHGVFCREGITGERKRDEIGFSTIRASDVVGEHSVWFADIGERVEISHKASSRMTFANGAVRAGKWLENKANGLFDMTDVLDLNNL

SEQ ID NO: 2757 - DNA, 249 bp, Haemophilus influenzae
atgaaaatccaccttatccgccataacaccacattagaattcaataatgaaacaagtttacttgatcatctcgagaaaaataatattcatcacgaatatcaatgccgtagtggctattgtggttcttgtcgcgttaagatcaaaaaaggcaaggtgtcttataaagaaatgccccttgcctttattcaacctgatgagattttattatgttgctgtcacgtagaaagtgacattgaaattgatttataa

SEQ ID NO: 2758 - protein, 82 aa, Haemophilus influenzae
MKIHLIRHNTTLEFNNETSLLDHLEKNNIHHEYQCRSGYCGSCRVKIKKGKVSYKEMPLAFIQPDEILLCCCHVESDIEIDL

SEQ ID NO: 2759 - DNA, 741 bp, Haemophilus influenzae
atgaaattattgataaaaacttcacttagtcagtggatttgcttgaattttgccaaaatccctatttttaaaatgctaggttttataaccgcactttttattactgcttgtagttctattagcaaagaaccagtgaagactgtggatatttatattaaaccttattattcggcggaaaatggaaaagcagaaaatgtatttgtacataaagaaattgatcctatgttacgtgaaaatacgttaaaaggttataaaagtgcggtaaaatttgtagaagaaaatccagctcgcatttcaccaatgacaatgtttaccttagccgctcgggcttacgattttggcttaagagatgaagcggttacttggttttatcgtggacaaaatcgtttgattaccgcactttatgtgttggatttaccaaaacaaacggtgcaggataatacagggttcagccatgttgtagggcagtttgttaatgcttatgcgttttgtgattttgataaacaaagtcgtgctgccaaaaatgcggtgaaatggacaattgcgcatccttatgaagtgattttcttaccagcattacccgcaaaatttgcagatcgtcaaaaagcgttaaaagaatcggaagaaaaattagttcaacgtttacaggaacaagcccgtttttttgctaatccaaaaaataaagaaaaatggcaaaaagagcggtcagaaaattttgtgaatgaacgattttgttggtaa

SEQ ID NO: 2760 - protein, 246 aa, Haemophilus influenzae
MKLLIKTSLSQWICLNFAKIPIFKMLGFITALFITACSSISKEPVKTVDIYIKPYYSAENGKAENVFVHKEIDPMLRENTLKGYKSAVKFVEENPARISPMTMFTLAARAYDFGLRDEAVTWFYRGQNRLITALYVLDLPKQTVQDNTGFSHVVGQFVNAYAFCDFDKQSRAAKNAVKWTIAHPYEVIFLPALPAKFADRQKALKESEEKLVQRLQEQARFFANPKNKEKWQKERSENFVNERFCW

SEQ ID NO: 2761 - DNA, 990 bp, Haemophilus influenzae
atgcaacatctgaacgagcttattgagaaagcgaaattagcgattgaatccattcaggataaaagtttaacggctttggatgaaatccgtgtcgaatattttggtaagaaagggtattttacgcaattaatgaaagaattgcgtaacgtgtcagctgaagaacgtcctgcgatgggtgcaaaaattaacgaagcaaaacaagctgcgttagaatttttaaatgctaaaaaagcagagtgggaacaggctgaacttaacgcaaaattagaaaaagaacgtgtagatgtcagtttaccaggtcgcaaagttgaaactggtggcttacacccagttaccatgacgattaatcgtgtaacaaaatttttctcagaacttggcttttcagttgaaaatggccctgaaattgaaagtgattattacaacttcgatgcgttaaatattcctaaacatcatccagcacgtgccgatcacgatactttttggtttaatccagaattattactccgcactcaaacttctggcgtgcaaattcgtactatggaaaaaatgcagccaccaattcgcattatggcaccaggacgtgtatatcgtaatgactacgatcaaacgcatacgccaatgttccatcaaattgaactactttatgtggataaaaaagcaaatttcaccgaattgaaaggtttattgcacgatttcttacgcgctttctttgaagaagatttacaagtgcgtttccgtccatcttatttcccattcacagagccttcagcggaagtggatgtgatggggaaaaacggtaaatggttagaagtgttaggctgcggtatggtgcatccaaatgtgttgcgtaatgttggtattgatccgaatgaatattctggttttgccgtgggaatgggcgttgagcgtttaacaatgttacgttataacgtaacagatttacgttcgttctttgaaaacgacttacgtttcttaaaacaatttaagtaa

SEQ ID NO: 2762 - protein, 329 aa, Haemophilus influenzae
MQHLNELIEKAKLAIESIQDKSLTALDEIRVEYFGKKGYFTQLMKELRNVSAEERPAMGAKINEAKQAALEFLNAKKAEWEQAELNAKLEKERVDVSLPGRKVETGGLHPVTMTINRVTKFFSELGFSVENGPEIESDYYNFDALNIPKHHPARADHDTFWFNPELLLRTQTSGVQIRTMEKMQPPIRIMAPGRVYRNDYDQTHTPMFHQIELLYVDKKANFTELKGLLHDFLRAFFEEDLQVRFRPSYFPFTEPSAEVDVMGKNGKWLEVLGCGMVHPNVLRNVGIDPNEYSGFAVGMGVERLTMLRYNVTDLRSFFENDLRFLKQFK

SEQ ID NO: 2763 - DNA, 2388 bp, Haemophilus influenzae
atgaaatttagtgaacagtgggtaagagaatgggtgaaccctgcggtgtccaccgagcaattatgcgagcaaattaccatgcttggcttagaagtagatggcgtggaaagcgttgcgggtacatttaatggtgtcgttgttggtgaagtagtagaatgtgcacaacatccagatgcagataaattacgtgtaactaaagtgaacgtaggcggtgatcgtttattggatatcgtgtgtggcgcagcaaattgtcgtcaaggcttaaaagtggcttgcgcaacagaaggtgcggtattacctggcgatttcaaaattaagaaaacgaaattacgtggtcagccatcagaagggatgctttgttcattttctgaattaggtattgatgttgaagcggatggtattattgaattgccacttgatgcaccaattggtactgatttacgtgaatatttagctttagatgataatgccatcgaaattagcttaacgccaaaccgtgcggattgtttgagcatctcaggtattgcgcgtgaaattggtgtggtaaataaacaactcgtaaatcaaccgcactttgaagcagtgccagcaacaatttctgataaagttcaaattgatttacaagcaccagaagcttgcccgcgttatttattacgtgtgataaagaacgtcaatgtaaaagcaccatcgccaatgtggatgcaagaaaaattgcgtcgctgtggtattcgttctatcgatcctattgtcgatattactaactatattttgcttgagcttggtcagccaatgcacgcgtttgatgtagctaaagttacacaacctgttcaagttcgtttcgcgaaagagggagaggaattagtattattagatggctcaatcgcaaaacttcaatcaaatacgttattaattgctgaccaaaatggtgctttagcaatggcagggatctttggtggtgcagccagtggcgtgaatagtgaaacgaaagatgtgattttagaatccgcatttttcgctccattagcgattgcaggccgtgcaagacaatatggtttacatactgatgcatcgcaccgttttgaacgtggtgtggattttgaattagcacgtaaagcaatggaacgagcaaccgcattattacttgaaatctgtggtggtgaagcgggtgagatttgtgaagcaagcagtgaaactcatcttcctaaagtcaatacagttcaacttcgccgtagtaaattagatgcacttttaggtcatcatattgaaacagaaagcgtaacagaaattttccatcgtcttggtttcgatgttacttatgcaaatgatatttggacggtaacttctgcaagctggcgttttgatattgaaatcgaagaagatttaattgaagaagtggcgcgtatttatggttataacagcattccaaacaatgcaccattagcgcatctccgcatgcgtgagcacaaagaatctgatttagatttagctcgaattaagaccgcacttgtggatgcagattatcaagaagctattacttatagctttgtggatccaaaaattcaaagtttattacatccacatcaagaagcacttgtattgccaaacccaatttctgtggaaatgtccgcaatgcgtgtgtctttaatgagtggtttattaggtgctgtactttataaccaaaatcgccaacaatctcgtgttcgtttatttgaaacaggattacgttttgtgccagatgctaatgctgaatttggcgtgcgtcaagaatttgttttaagtgcggtaattactggagcggcaaaatctgaacattgggcaggtaaagcagaatctgtagatttctttgatcttaaaggcgatttagaatcagcactttctttaacagaaggtggtaatagagttcgttttgttgcaaaacaatttgatgcattacatcctggccaatctgctgctattgaattagatggtcaagaaattggttttattggtgcaattcatccatctattagccaaaaacttggcttaaatggcaaaacttttgtatttgaaattctttggaatgcaattgcggcacgtaatgtggtgcaagcaaaagaaatttctaaattcccagcaaaccgtcgtgatttagctttagtcgtcgcggatagcgtaccagcaggggaattaatcgcagcatgtaaacaagcaggtggcgaaaaattggtgcaagtgaacttgttcgatgtatatcaaggtgtgggcgttgctgaaggctataagagtttagcgattagcttaactgtccaagataatgaaaaaacacttgaagatgaagaaattaatgcagtgatttcagtagtattagcggaggtaaaacaacgctttaatgctgaattaagggattaa

SEQ ID NO: 2764 - protein, 795 aa, Haemophilus influenzae
MKFSEQWVREWVNPAVSTEQLCEQITMLGLEVDGVESVAGTFNGVVVGEVVECAQHPDADKLRVTKVNVGGDRLLDIVCGAANCRQGLKVACATEGAVLPGDFKIKKTKLRGQPSEGMLCSFSELGIDVEADGIIELPLDAPIGTDLREYLALDDNAIEISLTPNRADCLSISGIAREIGVVNKQLVNQPHFEAVPATISDKVQIDLQAPEACPRYLLRVIKNVNVKAPSPMWMQEKLRRCGIRSIDPIVDITNYILLELGQPMHAFDVAKVTQPVQVRFAKEGEELVLLDGSIAKLQSNTLLIADQNGALAMAGIFGGAASGVNSETKDVILESAFFAPLAIAGRARQYGLHTDASHRFERGVDFELARKAMERATALLLEICGGEAGEICEASSETHLPKVNTVQLRRSKLDALLGHHIETESVTEIFHRLGFDVTYANDIWTVTSASWRFDIEIEEDLIEEVARIYGYNSIPNNAPLAHLRMREHKESDLDLARIKTALVDADYQEAITYSFVDPKIQSLLHPHQEALVLPNPISVEMSAMRVSLMSGLLGAVLYNQNRQQSRVRLFETGLRFVPDANAEFGVRQEFVLSAVITGAAKSEHWAGKAESVDFFDLKGDLESALSLTEGGNRVRFVAKQFDALHPGQSAAIELDGQEIGFIGAIHPSISQKLGLNGKTFVFEILWNAIAARNVVQAKEISKFPANRRDLALVVADSVPAGELIAACKQAGGEKLVQVNLFDVYQGVGVAEGYKSLAISLTVQDNEKTLEDEEINAVISVVLAEVKQRFNAELRD

SEQ ID NO: 2765 - DNA, 291 bp, Haemophilus influenzae
atggctacgataactaaacttgatattattgaatatttaagcgataaatatcacttatctaaacaagatacgaaaaatgtagtggagaactttttagaagagattcgttcatcgctagaatctggtcaagatgtgaaattatcaggatttggtaattttgaattacgcgataagtcatctcgcccagggcgtaacccaaaaacaggtgatgttgtgccagtttctgctcgccgagtagtgacatttaaacctgggcaaaagttacgtgcccgtgtagaaaaaactaaatag

SEQ ID NO: 2766 - protein, 96 aa, Haemophilus influenzae
MATITKLDIIEYLSDKYHLSKQDTKNVVENFLEEIRSSLESGQDVKLSGFGNFELRDKSSRPGRNPKTGDVVPVSARRVVTFKPGQKLRARVEKTK

SEQ ID NO: 2767 - DNA, 486 bp, Haemophilus influenzae
atgaaagtatataaatcatttttaatcgctactgcctcgctgtttttattcgcttgttccagttttcaaaacgatgattatgcgatgaactataaaggtcaaatcggcgatcctattatggccatagccatgttgagcgaacaacaacatgaatgggcaggtacaccttatgtgctcggcggcgtttctcgtcgtggggtagattgttctggttttgtgcagaaaactttcttcgatcgttttaatcttcgtttgcctagaagcactgttgaacaagctaattatggtaaacatgtacgcaaagaagatattcaaactggcgatttaattttctttaaaactggccgaggccctaatggttatcatgtgggaatttatgtaaaagaagataaattccttcatgcttccaccagagggggagtcgtctattcttcaatgaataacccttattggtcgaaagccttctggcaagtcagacggatttag

SEQ ID NO: 2768 - protein, 161 aa, Haemophilus influenzae
MKVYKSFLIATASLFLFACSSFQNDDYAMNYKGQIGDPIMAIAMLSEQQHEWAGTPYVLGGVSRRGVDCSGFVQKTFFDRFNLRLPRSTVEQANYGKHVRKEDIQTGDLIFFKTGRGPNGYHVGIYVKEDKFLHASTRGGVVYSSMNNPYWSKAFWQVRRI

SEQ ID NO: 2769 - DNA, 954 bp, Haemophilus influenzae
atgtcctcaaacttaaccgcacttcaaattcaacttgaaattttacgccttattccaaaaactcgttttattaccgcagaagaaatcttacaaaaacttgctgatattggcgttcaacgtgatattcgttcagtccaacgccagctagaaagtttgtctcaacagtttgaaattgagcgagatatgcgtgataaaccttatggatatcgatggaaatcaaatgctaaaggcttggatttaccgattttaaatgaacagcaatcacttgtgcttatgcttgctaaacaatatctcaatggcattttgccttctagcattatgaactcaatggaggcgttctttcaacaggccgaatataatttggtttatgacagccataaaaaatcaggggcagaatggcttaataaagttgctattgccccaactagtcagccgttattacctgccaaaatcaatccagaaattttttctcaaattagtaccgcactttatcaaaatcgatttttacaggtgcattatcggagtattcacggtaaagaacataaggcacaggtcaagccattggctttggttcaacaaggaccaagtagctatttagtcgcacaatatgagaatggcgatattttacaccttgctttgcatcgcttgcttaaggtaacagtgagtacaatgatatttgaacgccctgattttaatttgaaatcttatgtagaaagccaaaagtttggttttacctatggtcgaaaaattcgattaactttccgcattaataaagatattggtggatttttaacagaaacaccattatcaatggatcaaacagtaaaagattgtggcactgaatatgaaatttccgctaccgtgattaagagcgctatgctggaatggtggattgcccattttggtgaagattaccaagaaattgaccgcacttatttagacgaaaatgcctaa

SEQ ID NO: 2770 - protein, 317 aa, Haemophilus influenzae
MSSNLTALQIQLEILRLIPKTRFITAEEILQKLADIGVQRDIRSVQRQLESLSQQFEIERDMRDKPYGYRWKSNAKGLDLPILNEQQSLVLMLAKQYLNGILPSSIMNSMEAFFQQAEYNLVYDSHKKSGAEWLNKVAIAPTSQPLLPAKINPEIFSQISTALYQNRFLQVHYRSIHGKEHKAQVKPLALVQQGPSSYLVAQYENGDILHLALHRLLKVTVSTMIFERPDFNLKSYVESQKFGFTYGRKIRLTFRINKDIGGFLTETPLSMDQTVKDCGTEYEISATVIKSAMLEWWIAHFGEDYQEIDRTYLDENA

SEQ ID NO: 2771 - DNA, 456 bp, Haemophilus influenzae
atgaagaaaattgtttatattgatatggataatgtgatggttgattttccgtctggtattgcaaaattagatgagaaaaccaagcaagagtacgaaggtcgatatgatgaagtagagggcatttttagcttaatggaaccaatgccaaacgcgatttctgcggtgcataaattgatgaaaaaatatcatatttatgtgctttctactgcgccttggcataatccatccgcttggagtgataaagtaaaatggattcaacattatttcggtgaagaaaaaggttcagtcttatacaaacgattgattttatcccatcataaaaatctcaaccaaggtgattatttaattgatgatcgcactaaaaatggagctggtaaatttcaaggcgaacatgttcattttggtacagaacagtttgctaataaaaggagcctgaaaaatgacagagaaaaataa

SEQ ID NO: 2772 - protein, 151 aa, Haemophilus influenzae
MKKIVYIDMDNVMVDFPSGIAKLDEKTKQEYEGRYDEVEGIFSLMEPMPNAISAVHKLMKKYHIYVLSTAPWHNPSAWSDKVKWIQHYFGEEKGSVLYKRLILSHHKNLNQGDYLIDDRTKNGAGKFQGEHVHFGTEQFANKRSLKNDREK

SEQ ID NO: 2773 - DNA, 711 bp, Haemophilus influenzae
atgacagagaaaaataaaccaatttgcgtggtattaacgggagctggaattagtgccgaaagtggtattcctacttttagagctgaagatggattgtgggcagggcataaagtagaagaagtttgcacgcccgaagccttgcaaaagaaccgtgcgaaagtgcttgatttctataaccaacgccgtaaaaatgcggcagcagctaagccaaacgctgcgcatctcgccttagttgaactagaaaaagcctatgatgtgagaatcatcacgcaaaatgtggatgatttacatgaacgtgccggcagctcgaaggtgttgcatttacacggtgaattaaataaagctcgcagtagctttgatgaaagttatattgtggattgttttggtgatcagaaattagaagataaagatccaaatggacacccaatgcgcccttacatcgtcttttttggtgaaatggtgccgatgttagaacgagcggttgatattgtggaacaagcagatgttgtgttagtgattggcacttctttacaagtgtatccagccaatggcttagtcaatgaagccccaagaaaagcgccaatttatttgattgatcctaacccaaatacaggctttgttcgtaagcaagttattgcaataaaagaaaaagcaggcgagggtgtgccgaaagtggtggcagagttattagagaacaccaaaaactcatag

SEQ ID NO: 2774 - protein, 236 aa, Haemophilus influenzae
MTEKNKPICVVLTGAGISAESGIPTFRAEDGLWAGHKVEEVCTPEALQKNRAKVLDFYNQRRKNAAAAKPNAAHLALVELEKAYDVRIITQNVDDLHERAGSSKVLHLHGELNKARSSFDESYIVDCFGDQKLEDKDPNGHPMRPYIVFFGEMVPMLERAVDIVEQADVVLVIGTSLQVYPANGLVNEAPRKAPIYLIDPNPNTGFVRKQVIAIKEKAGEGVPKVVAELLENTKNS

SEQ ID NO: 2775 - DNA, 495 bp, Haemophilus influenzae
atgcatccagtaattgaattttatttagaacaaagaaaaagccaacataatttatctttgcaagatatgtgggcaatgccaaaaagaatgattggcgatgcttatttttatattccttggcttttacctgttactgaaagttccaaatggaatcgttcagtaccggtttttaacgaagaagacctggctatttttattggagatgaagcaattcaaaataaatatttacattctattgatattattctggattacttctgtttatatcgtgaagataataaaatattcccaaaaacagaattgagtgaacgtaaagtttggctacgtaatatcgggcatgaaagtaagaagatttcccgcatcattcgtagtttaaattattgcggtcatactgagttggctaaaagtttacagcaactggcaataaaattaggtcaagaaaaaggcgtaattcaagaagaaaccatagggatttggacaaatctacttaaataa

SEQ ID NO: 2776 - protein, 164 aa, Haemophilus influenzae
MHPVIEFYLEQRKSQHNLSLQDMWAMPKRMIGDAYFYIPWLLPVTESSKWNRSVPVFNEEDLAIFIGDEAIQNKYLHSIDIILDYFCLYREDNKIFPKTELSERKVWLRNIGHESKKISRIIRSLNYCGHTELAKSLQQLAIKLGQEKGVIQEETIGIWTNLLK

SEQ ID NO: 2777 - DNA, 717 bp, Haemophilus influenzae
atggtaacagaagagtttaaaaaagtagcggtatcttttgctggtggagatggcggaaaccctaaatcagaagtgtggttttgtgggttagaatgggggattggtgatgaagcttctcctgatgatttttataagaaatttagtttaagccctaaattaatagcgcactcttggttagaggacgattttgatggtagttggactacacaatataatcaaaaattatgttggtttttgtggtactactataatttagattggaaaagtggtgaaagctatgagtattttgttagtacttataatgtgctttatccacagggtattggttttaaattaaatatgctaccaataaatttcaaaaatagagcatcaattcaatggaatgaacaattcattaagatgacaggatttgaaacattcgatgaatatagagaatggtgtgttgaaaatcgtggtgctttttatcgtcaacttatagatgaatgtaatcctaaagttattatttgtacgggagtcactgaaaaagataacttctttaagttttttactggagaagccgtatatgaaaataaagcgttgaaagaatttaatatcttctatcgcaagtacaatgatactttaatttgtgtttgcccattttttggtggcccaagtggcattaattcttacgacaaaatggaagcattagtagagccagtaaaagaattatgtaaataa

SEQ ID NO: 2778 - protein, 238 aa, Haemophilus influenzae
MVTEEFKKVAVSFAGGDGGNPKSEVWFCGLEWGIGDEASPDDFYKKFSLSPKLIAHSWLEDDFDGSWTTQYNQKLCWFLWYYYNLDWKSGESYEYFVSTYNVLYPQGIGFKLNMLPINFKNRASIQWNEQFIKMTGFETFDEYREWCVENRGAFYRQLIDECNPKVIICTGVTEKDNFFKFFTGEAVYENKALKEFNIFYRKYNDTLICVCPFFGGPSGINSYDKMEALVEPVKELCK

SEQ ID NO: 2779 - DNA, 1002 bp, Haemophilus influenzae
atgaataaccaaaacccgattgaaatttaccaagctcaagatggcacaacgcaagtggaagtgagatttgaaaatgacaccgtttggctttcccaagcgcagatggctatgttatttggtaaagatattcgcaccatcaatgagcacattaccaatatatttgatgacgaagaacttgagaaagaatcaattatccggaaattccggatagttcgccaagaaggtaaacgccaagtcaatcgtgaaattgagcattatgatttagatatgattatctctgttggctatagagtaaaatctaaacaaggcattagtttccgccgttgggcaactgcacgtttaaaagaatatctgactcaaggctataccattaaccaaaaacgtttacagcaaaatgctcacgaattagaacaagcacttgcgcttattcaaaaaacggcaaattcatcggaattaacgctagaaagcggtcgcggattagtggatattgtcagccgttatacgcatacgtttttatggctacaacaatatgatgaaggtttacttgccgaaccacaaacacagcaaggcggtacattaccgacttatgctgaggcttgttctgcactagcagagttaaaatcacagctgatggcaaaaggtgaagcaagtgatctctttggacgtgaacgagataacggcttatctgcgattctaggtaatttagatcaaagtgtatttggtgaacctgcttatccaagcattgaagcaaaagcggcgcatttactttattttgtcgtcaagaatcatcctttttcagatggtaataaacgtagcggcgcatttttatttgtagatttcttacatagaaatgggcgtttgtttgatcataatggatacccagttatcaatgatactggccttgcagcacttactttgttagttgcagaatctgatccgaaacaaaaagaaacgattattaggcttattatgcatatgcttaaacataagcaagagaagtaa

SEQ ID NO: 2780 - protein, 333 aa, Haemophilus influenzae
MNNQNPIEIYQAQDGTTQVEVRFENDTVWLSQAQMAMLFGKDIRTINEHITNIFDDEELEKESIIRKFRIVRQEGKRQVNREIEHYDLDMIISVGYRVKSKQGISFRRWATARLKEYLTQGYTINQKRLQQNAHELEQALALIQKTANSSELTLESGRGLVDIVSRYTHTFLWLQQYDEGLLAEPQTQQGGTLPTYAEACSALAELKSQLMAKGEASDLFGRERDNGLSAILGNLDQSVFGEPAYPSIEAKAAHLLYFVVKNHPFSDGNKRSGAFLFVDFLHRNGRLFDHNGYPVINDTGLAALTLLVAESDPKQKETIIRLIMHMLKHKQEK

SEQ ID NO: 2781 - DNA, 201 bp, Haemophilus influenzae
atggcaatgaaagtaattatggcaagagatccactttttgaagatgtaaaaaaatttgtgcaacaacaaaaatttgtctcttgttcaatgattcagcgcagatttatgttgggttttaatcgagctggacaaattttagaacagttggaacaagcgggtattatttcatcaatgaaaaatgggcagagaaaagtattatga

SEQ ID NO: 2782 - protein, 66 aa, Haemophilus influenzae
MAMKVIMARDPLFEDVKKFVQQQKFVSCSMIQRRFMLGFNRAGQILEQLEQAGIISSMKNGQRKVL

SEQ ID NO: 2783 - DNA, 771 bp, Haemophilus influenzae
atgagcgtggattctgggctacccgatttccgcagcgttggtggattttggaatgcttatcctatgtttaaagaacataatatatcttttgaagacatcgcgacgccactagcttataagcataatcaggaacttgcctattggttttatgggcatcgattagttcaataccgaaatactattcctcacgaagggtatcagattttaaaacgttgggcgggagctaaatctcacggatatttcgtttttaccagtaatgtggatgggcattttcaaaaggctggttttgatgatagccatgtttatgaagtacacggtactttggcgcgtcttcagtgtgtcaataattgtcgaggattaagttggtctgcatcaagttttcaacccgtcgtggataatgaaaacttatgtttaaccagtgaaaaaccacattgtccttattgtgggggctttgctcgtcaaaatgtactaatgtttaacgattggagttatgcaagtcaatatcaggattttaaaaaagtgcggttagaatcgtggttaaaagaagtgcaaaatctcgtcgtcatcgaactgggtgccgggaaagccattccaactgtacgtcgattttctgaacgtacggcgaaagcaaaaaagggtggatttatccgtattaacccacaagatgcaggcgtgccgaaaatgcattttttaagtctcgaaatgaaggcgttagatgccctaaaggcgattgattgtcttctaaatccttctcaacaagcggttgaataa

SEQ ID NO: 2784 - protein, 256 aa, Haemophilus influenzae
MSVDSGLPDFRSVGGFWNAYPMFKEHNISFEDIATPLAYKHNQELAYWFYGHRLVQYRNTIPHEGYQILKRWAGAKSHGYFVFTSNVDGHFQKAGFDDSHVYEVHGTLARLQCVNNCRGLSWSASSFQPVVDNENLCLTSEKPHCPYCGGFARQNVLMFNDWSYASQYQDFKKVRLESWLKEVQNLVVIELGAGKAIPTVRRFSERTAKAKKGGFIRINPQDAGVPKMHFLSLEMKALDALKAIDCLLNPSQQAVE

SEQ ID NO: 2785 - DNA, 765 bp, Haemophilus influenzae
atggaaaatttttgcgaaattaccttctgccaacaaattggcagtaacaagcgacacaaccaagatgccctttttaatggcgaggcggtgtttcaatataaactcaaaacagctgaaaaacgccttgaaaaccgaccgcactttattgtgggcgtggcggatggtatttccaatagcaaccgacctgaaaaagcgagcaagttggcaatgcaattattaagccaaatggaaagcataagtcgtcaaacgatctacgatttacaatccagtttatctgaagaattagcggaggattatttcggctcagcaaccacttttgtggcggctgagattgatcaaataacctgtaaagcgaaaattctcagtgtgggcgacagtcgtgcttatttaattgattcccaaggaaaatggcaacaaatctcccaagatcattctattctttctgaattattggctgattttcccgataaaaaagaggaagattttgccactatttatggtggcgtttcttcttgtttagtcgcggattattctgaatttcaagataaaatcttttatcaagaaattgaaattcagcaaggggaaagtttattactgtgttctgatggattaacagatggactttcagaagaaatgagagaaaaaatttggaaacaatatgataatgataaatcaagattgacggtgtgtcgtaaattaattgtgaaacaaatagcttatgatgatttgtcggttataatatacacactgcttaagaaattttag

SEQ ID NO: 2786 - protein, 254 aa, Haemophilus influenzae
MENFCEITFCQQIGSNKRHNQDALFNGEAVFQYKLKTAEKRLENRPHFIVGVADGISNSNRPEKASKLAMQLLSQMESISRQTIYDLQSSLSEELAEDYFGSATTFVAAEIDQITCKAKILSVGDSRAYLIDSQGKWQQISQDHSILSELLADFPDKKEEDFATIYGGVSSCLVADYSEFQDKIFYQEIEIQQGESLLLCSDGLTDGLSEEMREKIWKQYDNDKSRLTVCRKLIVKQIAYDDLSVIIYTLLKKF

SEQ ID NO: 2787 - DNA, 1707 bp, Haemophilus influenzae
atgactagccaggattatgcaatcaaaggtgaagcattcaaactaagtaaggtatttagttcagattttcaatatttaattccaaactatcaacggccatattcttgggaggttgaaaatatcgagcaattatttgatgatttatatgatttttttcagggagataccgaagagacatattttttaggcagtgttgttgtgataaaaaaagatcattttccagaatcatatgtggttgatggtcaacagcgtttaactagtctaacaattttattatcagtcttagctagcctcttaagtgataaatcaaaagctaatagtatagagttatatataaaacaaccagaaaatctagctgaaagtattcctgctcagccaaggttaactttacgtaagcaagataatgacttctttagtaaatatattcagaatataaaaattgaagaattgaaaagtattaatattgattctgattgtaaaacggatgcgcagaaaaatatttataagaatacattagctctagtaaaaagagttaaagataaatttgaaggggatgaagaaggtatctttgagttttgtaaatttatcattcaaaaatgttgtattgttatcgtttcgactccaaatgaaaaatctgcatttcgtattttctcagttatgaatgatagaggattagatctattacctagtgatattttgaaatcttatttaataggaaaaatgagtagtaagcaagatgaatatacagataaatgggaagatttagaacaagatttaggtcgagctagattcaatgagctattttctcacattagaatgatttatctaaaaacaaaagcacaaaagagcttattggatgaatttcaagaaagtattattcctaatattaatagtgtaagtgattttatagatactgagcttacaagttatgcagataagtttaatgcattaaaatctagaaattatagagcaggaaattttactgaagagataaatggatatctattttggttaaataaagttaatttctctgagtggattccggtggttattagatttttgtatgctaagcctacagaacaacttgcttatgatttttttaaacatctagattgtttaacttcttatatttatttaagtgctaaaaatataaatgataggatttatcgttttggagatatattgaaacagttagagaatgatttaaattgttctaaagaattaaagattccgaataaattgtatttaacagatgaggaaaaacaagagtttaaattattacttgatgggaatgtttatcaattagtatcacctagacgaaattatttaattttacgaatggattcaatgatcagtgatggcgctgcgacatataatctacagaaagattctttgacaattgaacatgtattaccccaaacaattgaagatggtagtcaatggagttcttggtgggatgtggataaccataaattatgggtacaccgtctagctaatttagtgcctctaaatagaagacgtaattcttcagcaagtaatttggagtttaaggataaaaaagagaaatattttaaaggaaataataatgtttcatcttatgctttaactacacaagttttggatactgaagaatggactcctgatattgttgctcaaagacagggtaatttattatctagactttataaagaatgggaattaatttaa

SEQ ID NO: 2788 - protein, 568 aa, Haemophilus influenzae
MTSQDYAIKGEAFKLSKVFSSDFQYLIPNYQRPYSWEVENIEQLFDDLYDFFQGDTEETYFLGSVVVIKKDHFPESYVVDGQQRLTSLTILLSVLASLLSDKSKANSIELYIKQPENLAESIPAQPRLTLRKQDNDFFSKYIQNIKIEELKSINIDSDCKTDAQKNIYKNTLALVKRVKDKFEGDEEGIFEFCKFIIQKCCIVIVSTPNEKSAFRIFSVMNDRGLDLLPSDILKSYLIGKMSSKQDEYTDKWEDLEQDLGRARFNELFSHIRMIYLKTKAQKSLLDEFQESIIPNINSVSDFIDTELTSYADKFNALKSRNYRAGNFTEEINGYLFWLNKVNFSEWIPVVIRFLYAKPTEQLAYDFFKHLDCLTSYIYLSAKNINDRIYRFGDILKQLENDLNCSKELKIPNKLYLTDEEKQEFKLLLDGNVYQLVSPRRNYLILRMDSMISDGAATYNLQKDSLTIEHVLPQTIEDGSQWSSWWDVDNHKLWVHRLANLVPLNRRRNSSASNLEFKDKKEKYFKGNNNVSSYALTTQVLDTEEWTPDIVAQRQGNLLSRLYKEWELI

SEQ ID NO: 2789 - DNA, 2052 bp, Haemophilus influenzae
atgtctaaattcaaacttaacccaccatcagtttctctttataccgaaaaattaatgttgcaacttttattagaatatcgaggattttcagaggtttttcgtgagaataattggcgatatgacaatattgcggaagccttaggtttaccgagtgaaatggagaatagcgatgatttttgtgcgaaagtaaaaaaattattacaagggcgaaataaaacgttgccaaaattgaccgctctttgcgtaaacgagaatccaattattcaacaaaatattgatacgctgacccaattattatcattgaatgctgctgagcagacgcttttccgtttatcggttcagctacgcttagatgagccattaaaagaattgactggggtattaccaaaatctaatttggtaggggttagtgaggtattatcaaatttatttggtttgccaaaatcagacattatttcagccttaaaagacaagggaaaactattgggttatggcttgcttgaacgaaactataatccagatagactctatgactatttggagtggggcaaaatgttagattttgatgaatttatctcagaaccattaaatgaacaaatgttattaaaagtctgtacaaaaccagctattgagcctagtttgagtttagacgattttgcttatttaaacgagatgaaaacaatgatggtggattatcttcagtcctcatttgctactcatagaaagggtgtaaatattttaatttatggtgccccaggtacaggaaaaacagaatttgcaacgttattagcaaaagcagtgaatgtttcggcgcataatattacttatatggatgaaaatgaagaagtaatacgagcggaagaacgtttgaataagtgccgttttgcgcaaaaggtattagaagggcagtcttcgttattgatttttgatgaaatagaagatgttttttacgctagtctctttggccattctgtggcgcagaaaaataaagcttggatgaatcagttattggaaaacaataacgtgccgataatttggttatctaattctgtttcgggcatagatcctgcttttttacgtcgctttgattttattttagaaatgccggatttaccgttgaaaaataagtcggcacttattacgcaactgactgagggaaaattaagtccggcttatgtgcagcattttgctaaagtgcggtcattaacgcctgcgattttaagccgcacaattcgggtggcaaaggaactcaatacgtcaaattttgcggagacgttgctcatgatgtttaatcaaatattaaaatcgcaaaataaaccaaaaatcgaaccgcttgttttaggcaaagccgactataacttagattatgtggcttgtaacgacaatattcaccgtattagtgaagggttaaaacggtcgaaaaaaggacggatttgttgctatggtccgccgggaacaggaaaaactgcttgggcagcatggcttgctgaacagttggatatgccattgttgttaaaacaaggctcagatttgcttaattgttatgtgggcaggacagaacaaaatattgctcaagcctttgaacaagcgaaagctgataatgcgttattggtgttagatgaagtggatacgttcttattttctcgagaaggggcaaatcgaagctgggagcgttcacaagtgaatgaaatgttgacacaaattgaacgctttgaagggctgatggtggtatcaacaaatttaattgaggtgcttgatccagcagccttacgtcgttttgatttaaaattgaagtttgattatttaactcttaaacaacgcttggattttgctaaacaacaggctgaaatcttagggttgccatcattatcggaagaggatttaagtcagattgaatcgcttaatttgctgacgccaggcgattttgctgcggtggctcgtcgtcaccaattttccccttttcaaaaggtgcaagattggctgatggcactacaaggggaatgtgaagtgaaaccagcgttttctgcaacggcaaggcggataggattctaa

SEQ ID NO: 2790 - protein, 683 aa, Haemophilus influenzae
MSKFKLNPPSVSLYTEKLMLQLLLEYRGFSEVFRENNWRYDNIAEALGLPSEMENSDDFCAKVKKLLQGRNKTLPKLTALCVNENPIIQQNIDTLTQLLSLNAAEQTLFRLSVQLRLDEPLKELTGVLPKSNLVGVSEVLSNLFGLPKSDIISALKDKGKLLGYGLLERNYNPDRLYDYLEWGKMLDFDEFISEPLNEQMLLKVCTKPAIEPSLSLDDFAYLNEMKTMMVDYLQSSFATHRKGVNILIYGAPGTGKTEFATLLAKAVNVSAHNITYMDENEEVIRAEERLNKCRFAQKVLEGQSSLLIFDEIEDVFYASLFGHSVAQKNKAWMNQLLENNNVPIIWLSNSVSGIDPAFLRRFDFILEMPDLPLKNKSALITQLTEGKLSPAYVQHFAKVRSLTPAILSRTIRVAKELNTSNFAETLLMMFNQILKSQNKPKIEPLVLGKADYNLDYVACNDNIHRISEGLKRSKKGRICCYGPPGTGKTAWAAWLAEQLDMPLLLKQGSDLLNCYVGRTEQNIAQAFEQAKADNALLVLDEVDTFLFSREGANRSWERSQVNEMLTQIERFEGLMVVSTNLIEVLDPAALRRFDLKLKFDYLTLKQRLDFAKQQAEILGLPSLSEEDLSQIESLNLLTPGDFAAVARRHQFSPFQKVQDWLMALQGECEVKPAFSATARRIGF

SEQ ID NO: 2791 - DNA, 438 bp, Haemophilus influenzae
atgattatcaaagatccaaactctaatcgtgtaaatcaagaagatgataaccttgtttatcttcacgatttaacttcaacagtgttcgatttagccaatcaaaaagtgccagaaagttttgaagggcagagcgttcttccaattatgcgccaacaccaagataaccaaagaaaaggtgtgcttggtcagcttgcggggcattttgtgtattttgaacagcgtatgtggcgtcgtaaagattacaaactcgtatttaatgcgactgatgtttgcgaactttacaacatccgtaacgatccagaagaaatgcacaatttattctacgatccacaatacaacagcatcaaaaaagagatgttggaagaaatgcgtgcagagatgaaacgtctgaatgacccactggaaaattgggtttatcgaattattgacgaaatttaa

SEQ ID NO: 2792 - protein, 145 aa, Haemophilus influenzae
MIIKDPNSNRVNQEDDNLVYLHDLTSTVFDLANQKVPESFEGQSVLPIMRQHQDNQRKGVLGQLAGHFVYFEQRMWRRKDYKLVFNATDVCELYNIRNDPEEMHNLFYDPQYNSIKKEMLEEMRAEMKRLNDPLENWVYRIIDEI

SEQ ID NO: 2793 - DNA, 810 bp, Haemophilus influenzae
atgaaaacaacattactaaaaacactgacaccagagcttcaccttgttcaacataacgacatcccagttcttcatttaaaacatgcggttggaacagcaaaaatttccctgcaaggggcacagcttatcagttggaaaccgcaaaatgcgaagcaagatgtattatggttaagtgaagtagaacctttcgaaaatggcaatgctattcgtggtggcgtaccaatttgctatccttggtttggtggagtaaaacaacctgcacacggtacagctcgtattcgcttatggcagttaagccattacgatatttcagcgcataaagtgcggttagaatttgagttgttttctgatttaaatattatcgaagctaaaattgtaatggtatttacagataaatgtcatttaacttttacccattatggagaacctgcgcaagcagcattacatacctattttaatattggggatattaatcaagtggaagtacaaggtttacctgaaacttgttttaatagcttaaaccaacaacaagaaaatgttccgtcaccgcgtcacatttctgaaaatgttgattgcatttattctgcagaaaacatgcagaatcaaatcctagataaaagtttcaatcgtacaattgcactgcatcatcataatgcaagccaatttgttctttggaatccttggcacaaaaagacgagtggaatgagtgaaactggctatcaaacgatgttgtgcttagaaactgcacgtatccatcacttgcttgaatttggcgaaagtttaagcgtagaaatttcgcttaaaggctaa

SEQ ID NO: 2794 - protein, 269 aa, Haemophilus influenzae
MKTTLLKTLTPELHLVQHNDIPVLHLKHAVGTAKISLQGAQLISWKPQNAKQDVLWLSEVEPFENGNAIRGGVPICYPWFGGVKQPAHGTARIRLWQLSHYDISAHKVRLEFELFSDLNIIEAKIVMVFTDKCHLTFTHYGEPAQAALHTYFNIGDINQVEVQGLPETCFNSLNQQQENVPSPRHISENVDCIYSAENMQNQILDKSFNRTIALHHHNASQFVLWNPWHKKTSGMSETGYQTMLCLETARIHHLLEFGESLSVEISLKG

SEQ ID NO: 2795 - DNA, 408 bp, Haemophilus influenzae
atggcagagcaagcagagcttgatcttgttgaaattagcccaaatgcagagccgccggtttgtcgcattatgaactacggtaaattcctttacgaaaaaagtaaaaccgctaaagaacaaaagaaaaaacaaaaagttgtgcaagttaaggaaattaaattccgcccaggcacagacgaaggtgactatcaagttaaattacgcagcttaatccgtttcttagaagacggtgacaaagcgaaaattaccgtgcgtttccgtggtcgtgaaatggctcatcaagacatcggtttagatgtgttagagcgcgtaaaaaatgatttagctgaaatttcagtggttgaatctgcaccaggtaaattagaaggccgtcaggctgtaatggtgttagcaccgaagaaaaaataa

SEQ ID NO: 2796 - protein, 135 aa, Haemophilus influenzae
MAEQAELDLVEISPNAEPPVCRIMNYGKFLYEKSKTAKEQKKKQKVVQVKEIKFRPGTDEGDYQVKLRSLIRFLEDGDKAKITVRFRGREMAHQDIGLDVLERVKNDLAEISVVESAPGKLEGRQAVMVLAPKKK

SEQ ID NO: 2797 - DNA, 270 bp, Haemophilus influenzae
gtgcttccaagtaactttttaagttcgcctgattatgttgttttaaacgaaaaatgcggagttattttaacaatgcctaaaatcaaaacagtacgcggcgcagcgaagcgcttcaaaaaaactgcttctggtggtttcaagcgtaaacaatctcacttacgtcatattttgactaaaaaaacaactaaacgtaaacgtcatttacgtcataaatcaatggttgcgaaagcagaccaagttttagtagtagcttgcttaccatacgcataa

SEQ ID NO: 2798 - protein, 89 aa, Haemophilus influenzae
MLPSNFLSSPDYVVLNEKCGVILTMPKIKTVRGAAKRFKKTASGGFKRKQSHLRHILTKKTTKRKRHLRHKSMVAKADQVLVVACLPYA

SEQ ID NO: 2799 - DNA, 354 bp, Haemophilus influenzae
atggctcgtgtaaaacgtggtgttattgcaagagcacgccataagaaagttcttaaggctgctaaaggttattatggtgcacgttcacgcgtgtatcgcgttgctttccaagcggtgatcaaagctggtcaatacgcatatcgtgaccgtcgtcagcgtaaacgtcaattccgtcaattatggattgcacgtatcaacgctgcagcgcgtcaaaatggtttatcttatagcaaatttatcaacggcttgaaaaaagcatctgttgaaatcgaccgtaagattcttgctgatatcgctgtattcgacaaagtagcgtttgctgcattagttgaaaaagcaaaatctgcactttaa

SEQ ID NO: 2800 - protein, 117 aa, Haemophilus influenzae
MARVKRGVIARARHKKVLKAAKGYYGARSRVYRVAFQAVIKAGQYAYRDRRQRKRQFRQLWIARINAAARQNGLSYSKFINGLKKASVEIDRKILADIAVFDKVAFAALVEKAKSAL

SEQ ID NO: 2801 - DNA, 3636 bp, Haemophilus influenzae
atggccgaaacaatcccactgaatcccatcacactgcctttaaatcaaattagcttaatcgaagcatctgctggtacgggaaaaacatatactattggttctttatatctccgacttttattaaaggctggagaaaataacttttctcgtccattaaatgtggaagaaattctggtggtaacatttacggaaatggcaacagaagaactcaagaaaaaaattcgtgagcgtataacagatgcgattaataaactcactgcctttgctaaaacccaagataaatccgcatttaaaaatgatgaatttcttaccgcactttgtcatgatttagatatttttgaggcaattcatcgcttaaagttagctgaacaaaatatggatttggcggcgatttataccattcacggtttttgtcgccgtatgttgatgcaatatgctttccattctggcattcatttcaatttagaattaataaaagatcaatctgatttgttagttcgttttgctaatgaattttggcgagaacatttttatccgttagattttgaatctgcgaattttatcgcgacagaattagtatcaccagcaaatgtgttgtctttgttgaaagcggatttaggtaaagatttgcaggtggagattgaaaataaacaggcgttatctgtaccaatacaaatctttttaccgaaatatcttggtggttatcaaaaggcgttgaatgaattaaaggcattttggttagaaagtgcggatgaaatttcagcgattattacaaatgagctggttaaagattatccaaaagatcagttgaaatcgttaaatcgtaaaaagtaccaagtaaagcgtttaggggattggattaataaaatcaatcaatggtcaaataatcctagagattatcaaattaataccacattgaaagactatttcctacaatcatctattgagaaaaattgcgaagaatcaacggataaaaataaagataaaaaaaccgcaacgcctttttattccccgatttttgcagagcttgaaaagcgcgttaatgccttaatgacaccagatttactcagcaaactcactctttatcattatcgccaaggtctacaacaaaaacttttagactataaatttaatcatcaagaaaaatcctttgatgatttattgcgtttgctttgcgaagccttgcaaggtgcgcaaggagatgaattagcggaaatgattcgtttccaatatccttttgcgatgattgatgaatttcaggatacggattcacaacaatacgctattttttcaaaaatttatcgtgataatcccgaaaaaaatactggttttattatgattggtgatccgaagcaggcgatttatcgtttccgtggcgcagatatttttacttatctaaaagcatcggatgaagcccaatctcgctttgaactcactaaaaattatcgttcagagaagaatctggttgatggcgtaaatgcgttgtttgattttcctcaatcgccatttatttatcaaaatattaactttactgctgttgattctcgtgatgatcatctgcgattttatttaaatggcaaagccgaaccagcttatcgtttttatctaactgaaagtgacaaagtgaataaaactgaaatggcaaaaatatgtgctatttctattcaacattggctaaaaagtgcggtagaaaatcaggcagtttttcaaaatgaagatacttgtaaaacattgcaagcggcgaatattgccgtattggtgcgtgataaaaatgaagcggctttagtaaaaaatgaattgcaaaaattgggaatcgcgtcggtttatctttctgatcaaaatagcgtatttgatagcaatgttgcgaaagaattagcttgggtgcttaaagcctgtttgaatgtggcagaacgtccaattttgaacgcgattgcgaccgcactttttggcttaaatgcagcggatattcatcaaattcagcaaaatgaagcagattggcaacgttgggcagatagctttgctcaataccaacaaacttggcaacgccaaggaatattggcaatgttatatcaaattttattggagcaaggcatttcagagcgattattaagccaagccacgggcgagcgagatttaacggatttcctacatttggcagaaattttacaacaagctgccacgctacacgaaagtgaagcggcattgctcagttggtttgaaaaacaaattcaaggcgaaggtcgtcaagaggctcaaattcgtttagaaagtgaacgccagttggtaaaaatagtgacaatccataaatctaaaggcttagaatatgatttagtttggctaccatttttagctgtgccgagtaaagatccaagtaaaaaagacatcaatatttattattctaaagaacgagatgaaaccttatgggatatggaaaatcgcaatttgaacgctctttgtgaagaaacgtttgcggaagagttacgtttactttatgtggctttaacgcgtgccaaatatcaaatggcattcgctttgcctgcgcaatttgataaaaaatggaatgccttgcattatgtactaagccaaggtgaaataggcaaagaaataaatttgtcagagtctaaagatactgagacgttgttacaaacctttaaagaaaaaatgcgagataatgtggaaatctgtactaagccaaatctagaggcttttccgaccttatcaattaatacaaaaaatgatgatcttaaagccgcagaatttacgggcaatattgagcaagattggcgaataaccagttttacttcaattgaacaagcgcatcgccgacaaaattatttcactgaaagtgcgggtaaaaaacacgctgtttttgatgacgcaaaagattacgatagtcaaaatgctattgaaatgtccaccgcacttttaaacgaaaatgaatcaaatattttagatttaccacgaggtaaacaagtcgggactgcattgcatcgccattttgaaaattgctatttttctgatttagcaaatacagaagaaattgagaaattaagacaatccttacagttagatgaaacctttacagagccgctacaaaattggctacaacagatttcacatacgccactttctcatgaaataggaatagcattagctgatttggcaaataaagattgcattaaagaaatgccattttatttggctattcgggaacattttgatgttgaagcgtttaatcacacgttgaaagcccatcatcatttaccaagtgagccacttcaatttgagcaaattcaaggcatggtgagaggttcgattgacttagttttccgccataatgggaaatattgtcttgttgattataaatctaatttcttaggttcaactcttgctgattacaatcaagaggcattgaaaaaagaaatgttacacagtcactatgattggcaatatttaatttatacgctggcattacatcgttatttgcaaagtgttgtgcctcattacgattatgtgcgagatttcggtggggtattttatcttttcttacgtggaatgaatggtgagccacaatctggcgtattttacgatcatccaagcgttgaattaatcacagaattagacggggtgttttaa

SEQ ID NO: 2802 - protein, 1211 aa, Haemophilus influenzae
MAETIPLNPITLPLNQISLIEASAGTGKTYTIGSLYLRLLLKAGENNFSRPLNVEEILVVTFTEMATEELKKKIRERITDAINKLTAFAKTQDKSAFKNDEFLTALCHDLDIFEAIHRLKLAEQNMDLAAIYTIHGFCRRMLMQYAFHSGIHFNLELIKDQSDLLVRFANEFWREHFYPLDFESANFIATELVSPANVLSLLKADLGKDLQVEIENKQALSVPIQIFLPKYLGGYQKALNELKAFWLESADEISAIITNELVKDYPKDQLKSLNRKKYQVKRLGDWINKINQWSNNPRDYQINTTLKDYFLQSSIEKNCEESTDKNKDKKTATPFYSPIFAELEKRVNALMTPDLLSKLTLYHYRQGLQQKLLDYKFNHQEKSFDDLLRLLCEALQGAQGDELAEMIRFQYPFAMIDEFQDTDSQQYAIFSKIYRDNPEKNTGFIMIGDPKQAIYRFRGADIFTYLKASDEAQSRFELTKNYRSEKNLVDGVNALFDFPQSPFIYQNINFTAVDSRDDHLRFYLNGKAEPAYRFYLTESDKVNKTEMAKICAISIQHWLKSAVENQAVFQNEDTCKTLQAANIAVLVRDKNEAALVKNELQKLGIASVYLSDQNSVFDSNVAKELAWVLKACLNVAERPILNAIATALFGLNAADIHQIQQNEADWQRWADSFAQYQQTWQRQGILAMLYQILLEQGISERLLSQATGERDLTDFLHLAEILQQAATLHESEAALLSWFEKQIQGEGRQEAQIRLESERQLVKIVTIHKSKGLEYDLVWLPFLAVPSKDPSKKDINIYYSKERDETLWDMENRNLNALCEETFAEELRLLYVALTRAKYQMAFALPAQFDKKWNALHYVLSQGEIGKEINLSESKDTETLLQTFKEKMRDNVEICTKPNLEAFPTLSINTKNDDLKAAEFTGNIEQDWRITSFTSIEQAHRRQNYFTESAGKKHAVFDDAKDYDSQNAIEMSTALLNENESNILDLPRGKQVGTALHRHFENCYFSDLANTEEIEKLRQSLQLDETFTEPLQNWLQQISHTPLSHEIGIALADLANKDCIKEMPFYLAIREHFDVEAFNHTLKAHHHLPSEPLQFEQIQGMVRGSIDLVFRHNGKYCLVDYKSNFLGSTLADYNQEALKKEMLHSHYDWQYLIYTLALHRYLQSVVPHYDYVRDFGGVFYLFLRGMNGEPQSGVFYDHPSVELITELDGVF

SEQ ID NO: 2803 - DNA, 1923 bp, Haemophilus influenzae
atgttatctgtattacacaaacttaaagagcggggcattctttctcaaggtaattattactttgctaagttgatagctgataaacaatgtcatacggattatgcggaaccaatcaaaaatttagctatattattagctgcactttgtagttggcgttatacgcagggaaatacttgcagccaattagatcgctatttagaacataatttatttggcttggcttatcgtacaacggaagtagattatttagctgaaattcatgaaaagattggttatttacccgttgaagattggcaaaatgcgttgcgcgggcatatggcatttacgcaagatcccgtcaatcaaattgcgccaatggcatttcaatttggcgcgttgtatttctatcgcgcttggcaagatgaatatcgcatcgtgcaatatataaaaaataccttaaaaaaataccgcactttagccttttcttatgatgaaattcatcaaaaattagagaaatatttccctgaaaaacaggaaaaaacagattggcaaaaagtggcagtggcgatagcgattaaaagtccattttcgattattacaggcggcccaggaacaggaaaaaccacgacagttacgcgtttattgctcgttctacaagaattatttgattgtaaattacacatcaaattggttgcgccgactggcaaagccgcctctcgtttggaagagtcgattaaaaatgcgttaggttttatgcaagaaaaaatgaatgtatccaattcacttttcaatgcgattccacaaaaagccagcaccttgcatagtttactgggcgtgaatgcctttaatgattacacgcgctataacagtcataatcctttgcaattagatgtgttagttgttgatgaaacatcaatgattgatttgccgatgatggcaaaacttatcaatgcgttaaagcccgaaactcgattaattttattaggcgatcaggctcaattagcctctgttgaggcgggggcagtattgggagaattatctcaatttgttaatcaaccttatagtcatgaacaagccacgtatttacaagcgacaacaggctacaaagtagaaggttccgattgttcaaatccaatacgtgattgcttatgccatctaacagaaagtcgccgttttgataaagattcaggtattggcaagttggctgaattcattcaaaaaggcaaagcagacgatggccttgagttatttgaacattatccgcaagaattgcactttaatgccttaaatgatgaaggcgatgcggtcaatcaagtggtgaaaagtgcggtggaaaattaccgcactttcttaaaaatgttggacgatttacgtaaacaaaaaattgatcctaacgctaaaaatgaacaaggcatttcctatgccgaagctattcaagcacaatttaattctgtgaggtttttaaccgcacttcgtaatagcgatttaggtgttgaaaatctcaataaagaaatcgcgttagcgttgcgagcggaaaaattgctttggttccgtaatgaacaagattggtatatcggcaagccaattatgattactgaaaacgattataacgttcgcctttataacggcgatattggcctgtgcttggcaaatggcaaagtatggtttggcaatcgagaagtgctgacaagccgaattccagcgcacgaacccgcttttatgatgacgattcataaatctcaaggttcagaatttaaacataccgtcatggtgcttccaacagaagtaaatccagtactgtcgcgagaattagttttcacgggcgtgactcgtgcgaaaaaagaactcacagtatttgccgatgaaaaaatatggaaaacagcgattcgccaggccgtcaaacgccagagcggattgggaaaattattggaagatttaaattag

SEQ ID NO: 2804 - protein, 640 aa, Haemophilus influenzae
MLSVLHKLKERGILSQGNYYFAKLIADKQCHTDYAEPIKNLAILLAALCSWRYTQGNTCSQLDRYLEHNLFGLAYRTTEVDYLAEIHEKIGYLPVEDWQNALRGHMAFTQDPVNQIAPMAFQFGALYFYRAWQDEYRIVQYIKNTLKKYRTLAFSYDEIHQKLEKYFPEKQEKTDWQKVAVAIAIKSPFSIITGGPGTGKTTTVTRLLLVLQELFDCKLHIKLVAPTGKAASRLEESIKNALGFMQEKMNVSNSLFNAIPQKASTLHSLLGVNAFNDYTRYNSHNPLQLDVLVVDETSMIDLPMMAKLINALKPETRLILLGDQAQLASVEAGAVLGELSQFVNQPYSHEQATYLQATTGYKVEGSDCSNPIRDCLCHLTESRRFDKDSGIGKLAEFIQKGKADDGLELFEHYPQELHFNALNDEGDAVNQVVKSAVENYRTFLKMLDDLRKQKIDPNAKNEQGISYAEAIQAQFNSVRFLTALRNSDLGVENLNKEIALALRAEKLLWFRNEQDWYIGKPIMITENDYNVRLYNGDIGLCLANGKVWFGNREVLTSRIPAHEPAFMMTIHKSQGSEFKHTVMVLPTEVNPVLSRELVFTGVTRAKKELTVFADEKIWKTAIRQAVKRQSGLGKLLEDLN

SEQ ID NO: 2805 - DNA, 447 bp, Haemophilus influenzae
atgaaataccaaaaactcgaaaatcaagaagcaaattggaaatggatttacctaattcgtaaacatcgcgaaggggaaaatattactcgctacgaagaacgtagtttgcaagaagctaaagcccaagaattattagaatcccaaaattatcctgaaaaaattgaagaatggattaaaaatcatctttctccagccttaccaattaagcttgatcaagctattcgtgcacgccgtaaacgcttttttaatggagaaaaacaacataccaagaaaaaatctattgatttggaatatgcggtttggctacgtctttctaaatattctcgaaaaatgaagatgacgctttcggaaacaattacctatatgattgacgaaagagaaagcaaggcacaatttgaaaatcaaatggcagcaatgaaaaccagtttgaagaatttattaaaataa

SEQ ID NO: 2806 - protein, 148 aa, Haemophilus influenzae
MKYQKLENQEANWKWIYLIRKHREGENITRYEERSLQEAKAQELLESQNYPEKIEEWIKNHLSPALPIKLDQAIRARRKRFFNGEKQHTKKKSIDLEYAVWLRLSKYSRKMKMTLSETITYMIDERESKAQFENQMAAMKTSLKNLLK

SEQ ID NO: 2807 - DNA, 1776 bp, Haemophilus influenzae
gtgagttcattattttctcaacaacaagctattgagcaatctttaaattggcaggcattacaacctgatttggtaattcaagattttcctttagaaccagtggatttctgggcgttacaaccgaatgctacacagggtatcgatttatttttacgtcatccgacacgttccttactaatgatgaaagtgggcgaacctgttgaatatgcggagttattacaaaattttatatcgcaaaatcatcataaagtgcggtcaatttttggtgtaaattatgtgatagagcagggcgactctttttcttttcctcatgtttatactgagccagcaaaatctttagatgataattttgctagtcaaggggaggcgttaagtgcattgtattgcgatcaattccagcttttcggtagttttcggattcatccaagttcacaagatattcaattagtgccgggattggtgcataaggctaatggtggcgttttgattttaagtgcggcaacattgttatctcaatttgatttatgggggcgattaaaacaaattctgcaaacccagacttttgactggtattcagcccatccatttaaaaatttaccttgtgatataccaagctatgcgctgaacttaaaagtgattgtacttggtaatcgtactgaattagccactttggctgagttagaagaaaatctttattctttcgccgattatgctgaaattgaaagttatatttctgtagctgaagtggaggaacaaaaaacttgggcgggttatgtacaacaaatggctcaagagcaaaatattgagctagattttcttgctttaaataaactctatcaattattagttcgtgaaagtgaaaatcgctttttaattaatgcatctcctctcaaattaaaagaaatattacaggatgcttcaacttttgctgaaaaaactgcattaagtgcggtggattttgagggtatttttcaacaaaaattagcgcaatatggtttcttaaaagaacaaacttatgccgatattttaaatgagcaagtttatgtcgaaacgcaaggcgaaattgttggacaaattaatgggctttcggtaattgaatatcctggtacgccagtatgtttcggcgaaccttcgcgtattagttgtattgtgcaatttggcgatggggaagtgattgatgttgaaagaaaaaatgaactagcgggaaatattcacggtaaaggaatgatgattgcgcaggcttgtctttccaatatcttagatttgccctcgcaattgccattttctgcatcattggtgtttgaacagtcttatggagaaattgatggcgatagtgcatctttggcgattttttgtgtgttagcaagtgctttagccgatttgcctttgcctcaacatatcgcaattacaggatcaattgatcaatttggacttgttcattctgtgggtggtgtaaatgataaaattgaaggcttttttactatttgccaacgtcgtggtttgactggaaaacaaggtgtaatcattccaatgacaacaatccagcaactgagtttatctgatgacgtgaaaagtgcggtaaaaaatggcgagttttttatttatcctgtggaagatatttatcaggcttgtgaattgttatttgggcgtgatttgttagatgaaaacaaagattatacagaaaaaactgagcctttatctcgtcttattcaacgtcgtattgagggacgtgccgattctgaacgaaaaagtttttggcattttttccgctcctaa

SEQ ID NO: 2808 - protein, 591 aa, Haemophilus influenzae
MSSLFSQQQAIEQSLNWQALQPDLVIQDFPLEPVDFWALQPNATQGIDLFLRHPTRSLLMMKVGEPVEYAELLQNFISQNHHKVRSIFGVNYVIEQGDSFSFPHVYTEPAKSLDDNFASQGEALSALYCDQFQLFGSFRIHPSSQDIQLVPGLVHKANGGVLILSAATLLSQFDLWGRLKQILQTQTFDWYSAHPFKNLPCDIPSYALNLKVIVLGNRTELATLAELEENLYSFADYAEIESYISVAEVEEQKTWAGYVQQMAQEQNIELDFLALNKLYQLLVRESENRFLINASPLKLKEILQDASTFAEKTALSAVDFEGIFQQKLAQYGFLKEQTYADILNEQVYVETQGEIVGQINGLSVIEYPGTPVCFGEPSRISCIVQFGDGEVIDVERKNELAGNIHGKGMMIAQACLSNILDLPSQLPFSASLVFEQSYGEIDGDSASLAIFCVLASALADLPLPQHIAITGSIDQFGLVHSVGGVNDKIEGFFTICQRRGLTGKQGVIIPMTTIQQLSLSDDVKSAVKNGEFFIYPVEDIYQACELLFGRDLLDENKDYTEKTEPLSRLIQRRIEGRADSERKSFWHFFRS

SEQ ID NO: 2809 - DNA, 534 bp, Haemophilus influenzae
atgcaaaacgcttgtacacttaataaaaaaagtagttattcttatgatgatttgctcgcgtcaggtcgcggcgaattatttggtaaagaagggccacaattacccgctccaacaatgttgatgatggatcgtattgttgaaatgaatgaagaaacaggtgctttcggtaaaggatacattgaagccgaacttgatattaaacctgaattgccgttctttggttgccatttcattggcgatccagtaatgccaggttgtttaggattggatgcgatgtggcagcttgttgggttttatttaggctggattggtggcaaaggaaaagggcgagcattaggggttggcgaagtaaaattcacaggacaaattttgccgacggctaaaaaagtggtttaccgaatccatatgaaacgagttattaatcgtaaactagttatgggaatggctgatggtgaagttgaagtagatggtcgtgttatttataccgcgacagatttaaaagtgggactattccaagatacctcaacattttaa

SEQ ID NO: 2810 - protein, 177 aa, Haemophilus influenzae
MQNACTLNKKSSYSYDDLLASGRGELFGKEGPQLPAPTMLMMDRIVEMNEETGAFGKGYIEAELDIKPELPFFGCHFIGDPVMPGCLGLDAMWQLVGFYLGWIGGKGKGRALGVGEVKFTGQILPTAKKVVYRIHMKRVINRKLVMGMADGEVEVDGRVIYTATDLKVGLFQDTSTF

SEQ ID NO: 2811 - DNA, 729 bp, Haemophilus influenzae
atgatggtaaatgatgattttcaagaatatgtgaagcaactggtaacaaaacatcgagatgaacgaatttatccttttcaatataaaggaaaaaaatattggttgaagcaacctgaaaaattgaaaggtatttggctattattaaaaccccatcctaaaaaatcttttaaaaatgaattatatactttattgaagcttgctgaacaaaatgcgccagtgccaaaagtctcttattatagtgatcatttttttgttttagagaatgtgggacttaccgtatcacaatggctatgtaataaaaatatagatgaacaacagaaatttttaattatttatgatgcttgtctcgctttgattgatttgcatgctaaaaatttggtgcatggtcgtcctgctattcgagatattacttgggataaagggaaagttacttttcttgattttgaatctcgttcaaatagccgaaatcaaaattgggtagttattcgggatatgttatttttctttgatagtttatgtcgagaagaagatatttcggacacttttattcaaaaagtagcgttgtattatcaaacacattgtgaagcgaaaaattggcaaaatatgatcgtatttttgcaacgttttagctgggtttattatcttttattgccttttaaacctattgcaaagacagatttaatttcgatttatcgcttatttgaaattttcttgataaagaaaaaatga

SEQ ID NO: 2812 - protein, 242 aa, Haemophilus influenzae
MMVNDDFQEYVKQLVTKHRDERIYPFQYKGKKYWLKQPEKLKGIWLLLKPHPKKSFKNELYTLLKLAEQNAPVPKVSYYSDHFFVLENVGLTVSQWLCNKNIDEQQKFLIIYDACLALIDLHAKNLVHGRPAIRDITWDKGKVTFLDFESRSNSRNQNWVVIRDMLFFFDSLCREEDISDTFIQKVALYYQTHCEAKNWQNMIVFLQRFSWVYYLLLPFKPIAKTDLISIYRLFEIFLIKKK

SEQ ID NO: 2813 - DNA, 135 bp, Haemophilus influenzae
atgaagaaaatattttttatttttgtattatcaggcatattagctgcttgtactgtgggtggtggtgttagtgctggtggtggaagtaatggtgtaggattaggtgtggggattggatctggtattcgcttctaa

SEQ ID NO: 2814 - protein, 44 aa, Haemophilus influenzae
MKKIFFIFVLSGILAACTVGGGVSAGGGSNGVGLGVGIGSGIRF

SEQ ID NO: 2815 - DNA, 270 bp, Haemophilus influenzae
atgtctctaagtactgaaaaaaaagcagcaatcgttgctgaatttggtcgtgatgcgaaagatactggttcttctgaagttcaaatcgcattattaactgcacaaatcaaccacttacaaactcacttcgcagagcacaaaaaagaccaccatggtcgtcgtggtttattacgtatggtttctcgtcgtcgtaaacttttagactacttaaaacgtactgatcttgctttataccaaagcactatcgctcgtttaggtttacgtcgctaa

SEQ ID NO: 2816 - protein, 89 aa, Haemophilus influenzae
MSLSTEKKAAIVAEFGRDAKDTGSSEVQIALLTAQINHLQTHFAEHKKDHHGRRGLLRMVSRRRKLLDYLKRTDLALYQSTIARLGLRR

SEQ ID NO: 2817 - DNA, 1440 bp, Haemophilus influenzae
atgaaaaaattatcttcaatttccaccgcacttggttcctttttactttcagtgagttttagcctaccaactttcgccaatattaatgtttcagatttaacacaaaaactgcctgaaggctctaacgcaggtgttattgctaaaaatatcaatcaaaatcaaataattgctaattataatggctcaacctttatgctgcctgcgagtacacaaaaagtttttacagccgttgccgctaaacttgcattaggcgatcaattccaatttgagaccgcacttttgagtaatgggaaaattcaaaatgggaatttagatggcaacttaatcgtgagtttcacaggcgatcctgatctcacaagaggtcagctttatagcttacttgcagaattaaaaaaacaaggcatcaaaaaaattaatggcgatttagtattagatacctctgttttttctagtcacgaccgaggattaggttggatttggaacgatctcacaatgtgtttcaactctccaccagcagctgcaaatattgataacaactgtttctatgcggaactagatgcgaataaaaatccaggtgaaatagtaaaaattaatgtgcctgcacaatttccaattcaagtgttcggacaagtttatgtagtagatagcaatgaagctccttattgtcagctcgatgttgttgtacacgacaataatcgctatcaagtaaaaggatgtttagcccgtcaatataaaccttttggcttaagttttgccgtgcaaaatacggatgcttatgctgccgcgattattcaacgtcaattaagacaattaggtattgagttcaatggcaaagtcttgttaccccaaaaaccacaacaaggtcagctattagcgaaacatttatcaaaaccattaccagatttattgaaaaaaatgatgaaaaaatccgataaccaaattgccgattcattattccgagcggtggcattcaattactataaacgccccgcctcctttcaattaggcacattagcggttaaatccatattgcaaaaacaaggaattcgttttggtaatagcattttagccgatggttcgggtctatctcgccataatcttgtggcacctaaaacgatgctatccgttttagaatacatcgccaaaaacgaagataaactacatttaatggaaactttccccatcgcaggtgtagatggcacgatcagtgggcgaggtggattaattagcccgccattagtgaaaaacgtgattgctaaaactggttctttgaaaggcgtttataacctagctggctttatgacaaatgcgcgaggggaaaaagtggcatttgtacaatttattaatggctactcaacgggcgatttggaaagcaaaacaaaacgtgccccattagtacaattcgagcgtaatttatataacgaactctataactattaa

SEQ ID NO: 2818 - protein, 479 aa, Haemophilus influenzae
MKKLSSISTALGSFLLSVSFSLPTFANINVSDLTQKLPEGSNAGVIAKNINQNQIIANYNGSTFMLPASTQKVFTAVAAKLALGDQFQFETALLSNGKIQNGNLDGNLIVSFTGDPDLTRGQLYSLLAELKKQGIKKINGDLVLDTSVFSSHDRGLGWIWNDLTMCFNSPPAAANIDNNCFYAELDANKNPGEIVKINVPAQFPIQVFGQVYVVDSNEAPYCQLDVVVHDNNRYQVKGCLARQYKPFGLSFAVQNTDAYAAAIIQRQLRQLGIEFNGKVLLPQKPQQGQLLAKHLSKPLPDLLKKMMKKSDNQIADSLFRAVAFNYYKRPASFQLGTLAVKSILQKQGIRFGNSILADGSGLSRHNLVAPKTMLSVLEYIAKNEDKLHLMETFPIAGVDGTISGRGGLISPPLVKNVIAKTGSLKGVYNLAGFMTNARGEKVAFVQFINGYSTGDLESKTKRAPLVQFERNLYNELYNY

SEQ ID NO: 2819 - DNA, 477 bp, Haemophilus influenzae
atgcaacaaattccaatgactgtgcgtggcgcagaacaattacgagaagaattggatttcttaaaaaatgtacgtcgtccagaaattattaaagccatagcagaagcacgcgagcacggagatttaaaagaaaatgcagaatatcacgcagcgcgtgagcaacaaggtttttgtgaggggcgtattcaagagattgaaggtaaacttggtaatgctcaaattattgatgtcacaaaaatgccaaataatggtaaagtgatttttggtgcaacagttgtgcttgtaaatacaaatacagacgaagaagtcacttatcgcattgtaggcgatgatgaggctgatattaaatctggtttaatttcggtaaactcgcccattgcgcgaggcttaattggtaaagaattagatgataccgttaatattacaacgcctggtggtgtcgttgagtttgatattattgaagtgaattatatttaa

SEQ ID NO: 2820 - protein, 158 aa, Haemophilus influenzae
MQQIPMTVRGAEQLREELDFLKNVRRPEIIKAIAEAREHGDLKENAEYHAAREQQGFCEGRIQEIEGKLGNAQIIDVTKMPNNGKVIFGATVVLVNTNTDEEVTYRIVGDDEADIKSGLISVNSPIARGLIGKELDDTVNITTPGGVVEFDIIEVNYI

SEQ ID NO: 2821 - DNA, 300 bp, Haemophilus influenzae
atgacaaccttatcaaccaaacaaaaacaatttttaaaaggtcttgcgcaccatcttaacccagtcgttatgcttggtggaaatggcttaaccgaaggcgtacttgctgaaattgaaaatgcacttaattatcacgaactcatcaaagtaaaagttgctggtgcagatcgcaaaacaaaacaacttattatcgatgcgattgtgcgtgaaactaaagcagcacaagtacaaactatcgggcatattttggtgctttatcgcccaagcgaagaagcaaaaattcagcttccacgcaaataa

SEQ ID NO: 2822 - protein, 99 aa, Haemophilus influenzae
MTTLSTKQKQFLKGLAHHLNPVVMLGGNGLTEGVLAEIENALNYHELIKVKVAGADRKTKQLIIDAIVRETKAAQVQTIGHILVLYRPSEEAKIQLPRK

SEQ ID NO: 2823 - DNA, 630 bp, Haemophilus influenzae
atgggaaagaaaaaacgttcagcgagttcttctcgttggctaaatgaacattttagtgatcaatttgtgcaaaaagcgcataagcaaaagttgcgttcacgtgcttattttaagattgatgaaattcagcaaacggataaattatttaaacaaggaatgaccgtggtcgatctcggcgcagcaccgggcggttggtcgcaatacgtagtaagtcaaattgggggcaaaggtcgtgtaattgcttgtgatattttggaaatggatcccattgtaggcgttgattttctgcagggcgatttccgtgatgaaaacgttttgaatgctttattagtgcgtgtaggcgaagataaagttgatgttgtgatgtctgatatggcacccaattttagtggaatgccatcagtggatattccacgcgcaatgtatttggtcgagcttgctttagatatgtgtaaacaagtcttggcaagcaaaggaagttttgttgttaaagtctttcaaggggaaggctttgatgaatatttaagagaaattcgttctttatttaatgtggtaaaagtgcgtaagcctgaagcatcacgcggacgatctcgtgaagtatatattgtggcaacaggctataaaggttaa

SEQ ID NO: 2824 - protein, 209 aa, Haemophilus influenzae
MGKKKRSASSSRWLNEHFSDQFVQKAHKQKLRSRAYFKIDEIQQTDKLFKQGMTVVDLGAAPGGWSQYVVSQIGGKGRVIACDILEMDPIVGVDFLQGDFRDENVLNALLVRVGEDKVDVVMSDMAPNFSGMPSVDIPRAMYLVELALDMCKQVLASKGSFVVKVFQGEGFDEYLREIRSLFNVVKVRKPEASRGRSREVYIVATGYKG

SEQ ID NO: 2825 - DNA, 1089 bp, Haemophilus influenzae
  misc_feature 1070, 1071, 1072, 1073, 1074: n is any nucleotide
atggtcaaaaatctagtgctttgggtggtagtggcagtcattatgatgacggcataccaaagttttaattcatcttcagtagaaaattctactgattatacaacctttgtttacgatgtaagcaatggacaagtgacagcggcacgttttgatgccaatgaaattacggtaacgaaaaccgatggttctaaatattcaaccgtaatgcctccacttgaagacaaaaaattgcttgatgatttattaagcaaaaaagtgaaagtggaaggtacgccatttgaaaaacgtggtttcttatcccaaattttaatttcttggttcccaatgttatttcttgttggcgtatgggttttctttatgcgtcaaatgcaaggtggtggtggcaaagcgatgagctttggtaaaagtcgcgccaaaatgctgaatcaagatcagattaaggttacttttgcggatgtggctggttgcgatgaagcaaaagaagaagtgggcgaaatcgttgatttcttgcgtgatccgaataaattccaaaacttgggcggtaaaattccaaaaggtattttgatggtagggcctccaggtactggtaaaaccttgcttgctcgtgccattgcaggggaagcaaaagttccattcttcactatttctggttctgattttgtagaaatgtttgtgggcgttggtgcatctcgtgtacgtgatatgtttgaacaggctaagaaaaatgcaccttgcttaatcttcattgatgaaatcgatgctgtgggtcgccaacgtggggcgggtttaggcggcggacacgatgaacgtgaacaaaccttaaaccaaatgttggttgaaatggatggctttagtggtaatgacggcgtaattgttattgccgcaactaaccgtccagatgtacttgatccagctttaactcgtccaggccgttttgaccgacaagtaattgttggcttacctgatgtgaaaggtcgtgagcaaatcttaaaagtgcatatgcgtaaagtgtctgttgcgcaagatgttgatgcaatgacgttagcgcgtggtacgccgggctattctgnnnnncattccattcattaa

SEQ ID NO: 2826 - protein, 362 aa, Haemophilus influenzae
  VARIANT 357, 358: Xaa is any amino acid
MVKNLVLWVVVAVIMMTAYQSFNSSSVENSTDYTTFVYDVSNGQVTAARFDANEITVTKTDGSKYSTVMPPLEDKKLLDDLLSKKVKVEGTPFEKRGFLSQILISWFPMLFLVGVWVFFMRQMQGGGGKAMSFGKSRAKMLNQDQIKVTFADVAGCDEAKEEVGEIVDFLRDPNKFQNLGGKIPKGILMVGPPGTGKTLLARAIAGEAKVPFFTISGSDFVEMFVGVGASRVRDMFEQAKKNAPCLIFIDEIDAVGRQRGAGLGGGHDEREQTLNQMLVEMDGFSGNDGVIVIAATNRPDVLDPALTRPGRFDRQVIVGLPDVKGREQILKVHMRKVSVAQDVDAMTLARGTPGYSXXHSIH

SEQ ID NO: 2827 - DNA, 327 bp, Haemophilus influenzae
  misc_feature 301, 302, 303, 304, 305: n is any nucleotide
atgtatttaatcgaaacctattttcgcctgactgcgctcgaaaataatattgaatcacaaagtcgtttactcaatgcagtgatcgatcaatggcggtataatgggcaaattatcggacgtgaaattcctttatatttagcggaagaagatggcgcacaaggttttgctatgcgtgtcatttgccctgagcaagatagtcttttcccacaaaataataacgcagaagtgaatcgcgcattacaagaagccgaaaagtgcggtgtaatttttgatggttttcaacttgtgggtgatgatttcnnnnncattcattcattaattaattaa

SEQ ID NO: 2828 - protein, 108 aa, Haemophilus influenzae
  VARIANT 101, 102: Xaa is any amino acid
MYLIETYFRLTALENNIESQSRLLNAVIDQWRYNGQIIGREIPLYLAEEDGAQGFAMRVICPEQDSLFPQNNNAEVNRALQEAEKCGVIFDGFQLVGDDFXXIHSLIN

SEQ ID NO: 2829 - DNA, 381 bp, Haemophilus influenzae
atgatagaacaattaaaacaagctaaaaattgggaagatcgctatcgcctgattattcaagcaggcaaaaatttacctcgcccaagcgataatgaactcgctcaaatgcaacctattactggctgcgaagcacaaatgtggtttcaaattatgcctaaacatgaccgcacttttcaattcagcggatttagcgaagccagaattatgaatggcttgctttggattttattcaataaaatcaatggtaaaacagcggatgaattgaatacatttgatattactgtattttttagcgaactcggcatttcacaacgtttaagtgaaatgcgtttaaacggcttaaaccaaatcggacagcaattaaaaaatttatgtatttaa

SEQ ID NO: 2830 - protein, 126 aa, Haemophilus influenzae
MIEQLKQAKNWEDRYRLIIQAGKNLPRPSDNELAQMQPITGCEAQMWFQIMPKHDRTFQFSGFSEARIMNGLLWILFNKINGKTADELNTFDITVFFSELGISQRLSEMRLNGLNQIGQQLKNLCI

SEQ ID NO: 2831 - DNA, 909 bp, Haemophilus influenzae
atgctaccttggaaatccagtaagaaattttccaaccattcaatggcttctacatccaagtggttggttcatcaagttgctaattttgtcacttggcatgaaacggcgaaaaagtgcggtgcaaaaattcgagttttaccgattttagataattggctaattgatgaaaatgcgcttatttctaccctttctgaaaaaacaaaactcgttgcgctgaattttgtttcaaatgtcacgggcacagaacagccgattaaacgcctgattcaactggttagaaaacatagtcatgcgttggttttagtggatgctgcacaagcgattagtcatattaaaatcgatttacaagatttagatgccgatttcctcgcattttctgcccataaaatttatggtccaaatgggcttggcgttttaacaggaaaattgaccgcactttctcaacttcaaccgctctttttcggtggaaaaatggttgatcgggtatcaaatgagcgtattacttttgccgaattgccttatcgtttagaagctggcacacccaatattgctggggttattggctttaatgcggtgctggattggctacaaaaatgggattttaccgcagcagaacagcacgctatatccttggctgaatccgtcaaagtgcggttaaaatcttacgagaattgccgattattcgattctcctcaaccaagcaccgttgtttgctttatatttgacggcattgactgttccgatctttctacacttttgagcgaacaaaatattgcgctccgagtgggcgaacattgtgcccagccttatttagcacgcttagacgaacgcaccacattgcgtctttcttttgccccttataatacgcaaaaaaaaagatgtagaggcattcttcaccgccttagataa

SEQ ID NO: 2832 - protein, 302 aa, Haemophilus influenzae
MLPWKSSKKFSNHSMASTSKWLVHQVANFVTWHETAKKCGAKIRVLPILDNWLIDENALISTLSEKTKLVALNFVSNVTGTEQPIKRLIQLVRKHSHALVLVDAAQAISHIKIDLQDLDADFLAFSAHKIYGPNGLGVLTGKLTALSQLQPLFFGGKMVDRVSNERITFAELPYRLEAGTPNIAGVIGFNAVLDWLQKWDFTAAEQHAISLAESVKVRLKSYENCRLFDSPQPSTVVCFIFDGIDCSDLSTLLSEQNIALRVGEHCAQPYLARLDERTTLRLSFAPYNTQKKRCRGILHRLR

SEQ ID NO: 2833 - DNA, 1386 bp, Haemophilus influenzae
ttggatgtagaagccattgaatggttggaaaatttcttactggatttccaaggtagcattgtatttatttcccatgaccgttcttttattcgcaaaatggcaacacgtattgtggatttagatcgcggtcaattgcagtcttatctaggcaattacgatttatatttaaccacgaaagaagaaaatctacgcgttgaagccttgcagaatgaattatttgataaacgtctagcacaggaagaagtgtggattcgccaaggtatcaaggctcgccgtacaagaaatgaagggcgagtgcgagcattaaaagcgatgcgtgaggaacgccgccaacgccgtgatgtaatgggaacagccaaattacagttagatacctcaagtcgttcaggcaaaattgtctttgaaatggaaaatgttagctatgaagtcacaggaaaaactttgttaaaagatttttcaacaacgattttacgtggagacaaaattgcccttgttgggccaaatggctgtgggaaaaccacgttcattaaattattgttgggggaaattcagccaacatcaggaaaaatccgttgtggtactaaattagagattgcttattttgaccaataccgtgctgatttagatcctgaaaaaaccgtaatggataatgtggcagatggtaaacaagatattgaaatcaatggtgtaaaacgtcatgtgctagggtatttgcaagatttcttgttcccaccaaaacgtgcaatgaccccagttaaagccttatcggggggagaacgaaatcgtttattactcgcaaaattgttactcaaaccaaataatttattgattcttgacgaaccaaccaatgaccttgatgtagaaacattggagcttttagaagaaattttgactgattatcaaggcacattgttaattgtgagccatgaccgtcaatttatcgataatactgcgacagaatgttatttattcgaaggtgaagggcatttgaataagtatgtgggaggattctttgatgcgaaacagcaacaagccaatttttgggcaagcaaagcggtggaagaacaggctaaggcgaagaaatctgaaccactaaaagaagaaagtgcggtgaaaaatgaccgcacttctaagccgaaatccgtgaaactttcttataaagaacaacgtgagttagaacagctgccacaacttttggaagagttggaaaccaaaatcaccacactgcaagctgaaatagccgatccagcatttttccaacaagctcacgatattaccgacgctaaattaaaagaattggcggatactgaagccgaattagaaacagcatttttacgctgggaagaattagaagaaaagaaaaatttggctgaaaacaaaaattaa

SEQ ID NO: 2834 - protein, 461 aa, Haemophilus influenzae
MDVEAIEWLENFLLDFQGSIVFISHDRSFIRKMATRIVDLDRGQLQSYLGNYDLYLTTKEENLRVEALQNELFDKRLAQEEVWIRQGIKARRTRNEGRVRALKAMREERRQRRDVMGTAKLQLDTSSRSGKIVFEMENVSYEVTGKTLLKDFSTTILRGDKIALVGPNGCGKTTFIKLLLGEIQPTSGKIRCGTKLEIAYFDQYRADLDPEKTVMDNVADGKQDIEINGVKRHVLGYLQDFLFPPKRAMTPVKALSGGERNRLLLAKLLLKPNNLLILDEPTNDLDVETLELLEEILTDYQGTLLIVSHDRQFIDNTATECYLFEGEGHLNKYVGGFFDAKQQQANFWASKAVEEQAKAKKSEPLKEESAVKNDRTSKPKSVKLSYKEQRELEQLPQLLEELETKITTLQAEIADPAFFQQAHDITDAKLKELADTEAELETAFLRWEELEEKKNLAENKN

SEQ ID NO: 2835 - DNA, 1221 bp, Haemophilus influenzae
  misc_feature 12, 13, 14, 15, 16, 1194, 1195, 1196, 1197, 1198: n is any nucleotide
atgaatgaatgnnnnntggatgtagaagccattgaatggttggaaaatttcttactggatttccaaggtagcattgtatttatttcccatgaccgttcttttattcgcaaaatggcaacacgtattgtggatttagatcgcggtcaattgcagtcttatctaggcaattacgatttatatttaaccacgaaagaagaaaatctacgcgttgaagccttgcagaatgaattatttgataaacgtctagcacaggaagaagtgtggattcgccaaggtatcaaggctcgccgtacaagaaatgaagggcgagtgcgagcattaaaagcgatgcgtgaggaacgccgccaacgccgtgatgtaatgggaacagccaaattacagttagatacctcaagtcgttcaggcaaaattgtctttgaaatggaaaatgttagctatgaagtcacaggaaaaactttgttaaaagatttttcaacaacgattttacgtggagacaaaattgcccttgttgggccaaatggctgtgggaaaaccacgttcattaaattattgttgggggaaattcagccaacatcaggaaaaatccgttgtggtactaaattagagattgcttattttgaccaataccgtgctgatttagatcctgaaaaaaccgtaatggataatgtggcagatggtaaacaagatattgaaatcaatggtgtaaaacgtcatgtgctagggtatttgcaagatttcttgttcccaccaaaacgtgcaatgaccccagttaaagccttatcggggggagaacgaaatcgtttattactcgcaaaattgttactcaaaccaaataatttattgattcttgacgaaccaaccaatgaccttgatgtagaaacattggagcttttagaagaaattttgactgattatcaaggcacattgttaattgtgagccatgaccgtcaatttatcgataatactgcgacagaatgttatttattcgaaggtgaagggcatttgaataagtatgtgggaggattctttgatgcgaaacagcaacaagccaatttttgggcaagcaaagcggtggaagaacaggctaaggcgaagaaatctgaaccactaaaagaagaaagtgcggtgaaaaatgaccgcacttctaagccgaaatccgtgaaactttcttataaagaacaacgtgagttagannnnncattccattcattaattaattaa

SEQ ID NO: 2836 - protein, 406 aa, Haemophilus influenzae
  VARIANT 4, 5, 6, 398, 399, 400: Xaa is any amino acid
MNEXXXDVEAIEWLENFLLDFQGSIVFISHDRSFIRKMATRIVDLDRGQLQSYLGNYDLYLTTKEENLRVEALQNELFDKRLAQEEVWIRQGIKARRTRNEGRVRALKAMREERRQRRDVMGTAKLQLDTSSRSGKIVFEMENVSYEVTGKTLLKDFSTTILRGDKIALVGPNGCGKTTFIKLLLGEIQPTSGKIRCGTKLEIAYFDQYRADLDPEKTVMDNVADGKQDIEINGVKRHVLGYLQDFLFPPKRAMTPVKALSGGERNRLLLAKLLLKPNNLLILDEPTNDLDVETLELLEEILTDYQGTLLIVSHDRQFIDNTATECYLFEGEGHLNKYVGGFFDAKQQQANFWASKAVEEQAKAKKSEPLKEESAVKNDRTSKPKSVKLSYKEQRELXXXFHSLIN

SEQ ID NO: 2837 - DNA, 1068 bp, Haemophilus influenzae
atggatggctttagyggtaatgacggcgtaattgttattgcagcaactaaccgtccagatgtacttgatccagctttaacycgtccaggccgttttgaccgrcaagtarttgttggcttacctgatgtgaaaggtcgtgagcaaatcttaaaagtgcatatgcgtaaagtgtctgttgcgcaagatgttgatgcaatgacgttagcgcgtggtacgccgggctattctggtgcagatttagcaaatttagtcaatgaggcggctttgtttgctgctcgagtgaataaacgtacggtaaccatgcttgagtttgaaaaagcgaaagataaaatcaatatggggccagagcgtcgcactatgattatgacggataagcaaaaagaatccactgcttatcatgaagcaggtcacgccattgtggggtatttagtgcctgaacacgatcctgttcacaaagtgacgattattcctcgaggacgtgccttgggtgtgacattcttcttacctgagggcgatcaaattagtattagccaaaaacaattagaaagtaagctttctaccttgtatgcagggcgtttagcagaagatttgatttatggtgaagaaaatatctcaacgggtgcatcaaatgatattaaagtcgcaactaatattgcgcgtaatatggtaacgcaatggggattctctgaaaagttaggtccgattctttatacggaagatgagggcgaggttttcttaggtcgttcaatggcgaaagcgaaacatatgtcagatgaaaccgctcatgcaattgatgaagaagtgcgtgcaattgtaaatcgtaactatgcgagagcaagagagattttgaacgacaatatggatattcttcatgcgatgaaagatgcattagtcaaatatgaaaccattgaagaagagcaaattaaacaattgatgaatcgcgaacctgttacaccgccatcaggttggggagagccgaaaactcagcaggctgcttatgcaaattcaacaacgaatgatacaaagcccgaaagtgcggtagaaaataccgatgattttaatgtttaa

SEQ ID NO: 2838 - protein, 355 aa, Haemophilus influenzae
  VARIANT 37: Xaa is any amino acid
MDGFSGNDGVIVIAATNRPDVLDPALTRPGRFDRQVXVGLPDVKGREQILKVHMRKVSVAQDVDAMTLARGTPGYSGADLANLVNEAALFAARVNKRTVTMLEFEKAKDKINMGPERRTMIMTDKQKESTAYHEAGHAIVGYLVPEHDPVHKVTIIPRGRALGVTFFLPEGDQISISQKQLESKLSTLYAGRLAEDLIYGEENISTGASNDIKVATNIARNMVTQWGFSEKLGPILYTEDEGEVFLGRSMAKAKHMSDETAHAIDEEVRAIVNRNYARAREILNDNMDILHAMKDALVKYETIEEEQIKQLMNREPVTPPSGWGEPKTQQAAYANSTTNDTKPESAVENTDDFNV

SEQ ID NO: 2839 - DNA, 708 bp, Haemophilus influenzae
atgtacatatatgaaatatatagaaataataagaaccacttctttcttgattatttattcccagtaaaacttaataaaccaatatctatatttattggtgaaaatggcgtaggtaaatcaaccataatggaggctatagctatttatttaggttgcccagcagaaggcggttcaaaaaactttaatttttcaactgaaaatacacatatccaaataccaaatatgatgataaaaaaaggaactaaatttcctaaagatatatttttttatagatcagaaactttttatacctttatgagtgaaatgaaaaaactagatgcgccagaatttggagggggtaaaataaattcttactatggagggattgaattacataaattatctcatggagaatcaatgaatgcactatatatgaatagatttaacaaaaatgggctatatatattagatgaacccgaatcctccttatctctcaacaatcagcttaaatttattgaaagaatcgtaactctaagtagaaatggagcccaatttatcattgcaacgcattcacctattattatgcaaacccctgaatcagagttactagaagtgacaaaaaatggtgtaaaaacagttaactttcaagaaacaaacatatattatatgtatcgtgagattatgcaggataattctcacacttatctgagtagtatactaaatctataa

SEQ ID NO: 2840 - protein, 235 aa, Haemophilus influenzae
MYIYEIYRNNKNHFFLDYLFPVKLNKPISIFIGENGVGKSTIMEAIAIYLGCPAEGGSKNFNFSTENTHIQIPNMMIKKGTKFPKDIFFYRSETFYTFMSEMKKLDAPEFGGGKINSYYGGIELHKLSHGESMNALYMNRFNKNGLYILDEPESSLSLNNQLKFIERIVTLSRNGAQFIIATHSPIIMQTPESELLEVTKNGVKTVNFQETNIYYMYREIMQDNSHTYLSSILNL

SEQ ID NO: 2841 - DNA, 597 bp, Haemophilus influenzae
gtgctacaatctaccttaactttgagaaagatttataatttaattatcttattatgtatatcagattatatatctgcaagagaaattgtttcatataatgaatttaagaatttcaatattattaggcaaacaaaaaataattcttgtggagcagcagctcttgccacaatgctaaaatataaatttcatattagtgaaattaacgaagatactattctatataaattgaaaaatccaaatgaagaagcatccttttttgaacttgcaagaatttcaaaagaattcaatataaatgctattggattagcattaacgttaaaggaattattaaacataaataaaccagtaattgcctatgtaaacaacagtttaaacaatgatcattttattatcatcaatggtatttttaataaagagttattaatatcagatccagcaattggaaattactcactaaaagtttctgactttgaaaaaatatggctattgagaaatgataaaaaaggagatattttatacttgcatagagattcaaaagatcacttagagtttattgacaatattaaaacaaaacatagattattattaagaaattaa

SEQ ID NO: 2842 - protein, 198 aa, Haemophilus influenzae
MLQSTLTLRKIYNLIILLCISDYISAREIVSYNEFKNFNIIRQTKNNSCGAAALATMLKYKFHISEINEDTILYKLKNPNEEASFFELARISKEFNINAIGLALTLKELLNINKPVIAYVNNSLNNDHFIIINGIFNKELLISDPAIGNYSLKVSDFEKIWLLRNDKKGDILYLHRDSKDHLEFIDNIKTKHRLLLRN

SEQ ID NO: 2843 - DNA, 855 bp, Haemophilus influenzae
atgaaaaacaaaatattatttatatttatattcaacccaatactgtgttattctaataattataattttattacattaaatgatgaatttgacaactctggtaaattcacattagtaacatcatcttcattacatttaaaaaacagccatgaatttttaagaagaaatgtatttgatatacaaaattatgacaattcatatggaagtgaaaaatatcaagtactatcctttgaacaaggaattcggtatggtttaacaaataaaattaatatatctggtagtattaatagttcatacagtaaatactcatttgtatctagagaagaaagtagaaaggaacaatcatacgataaattaagatttgatacgataaatattggattatctactaaattaaataactttaaatcagattggaataaatcaatatacttttcatcagatgccataattaaaaatgaaaatacaagtttttttaaaaatttctatttagattatataatagataaaactatagatcctatagttttatccttaaaaacaggattgaaatattactcaaagataaaaaaatataaccaatatttcaaaccatcaaatgtaataaatataaaacctagagtagattttttagttaatccacagatatctataagtttatctacagaaatacaattaaaaagtagtgaaaagtacaatgaaaaagtaacaaatgtatctggaatagaaaactttttatctataggaatatcgtataatttaaatttaaaaaatcgtttatattttgaaacttcttttaatacaacaggtaattcaggtgctacaatctaccttaactttgagaaagatttataa

SEQ ID NO: 2844 - protein, 284 aa, Haemophilus influenzae
MKNKILFIFIFNPILCYSNNYNFITLNDEFDNSGKFTLVTSSSLHLKNSHEFLRRNVFDIQNYDNSYGSEKYQVLSFEQGIRYGLTNKINISGSINSSYSKYSFVSREESRKEQSYDKLRFDTINIGLSTKLNNFKSDWNKSIYFSSDAIIKNENTSFFKNFYLDYIIDKTIDPIVLSLKTGLKYYSKIKKYNQYFKPSNVINIKPRVDFLVNPQISISLSTEIQLKSSEKYNEKVTNVSGIENFLSIGISYNLNLKNRLYFETSFNTTGNSGATIYLNFEKDL

SEQ ID NO: 2845 - DNA, 1083 bp, Haemophilus influenzae
atgaaaaaatttgcaggtttaattactgccagcttcgtagctgcaactttaaccgcttgcaacgataaagatgctaagcaagaaactgcaaaagctacggctgctgctaatgacactgtgtatctctacacttggacagaatatgtaccagatggtcttttagatgagtttactaaagaaactggcatcaaagttatcgtttcaagcctagaatcaaacgaaacaatgtacgctaaactcaaaactcaaggcgagtctggtggctatgatgttatcgcaccttctaactacttcgtttctaaaatggcacgcgaaggaatgttaaaagaacttgatcacagcaaattacctgttcttaaagaattagatcctgattggctcaataaaccttatgataaaggtaacaaatactctcttccgcaacttttaggtgcgccaggtatcgcattcaataccaacacttacaaaggcgaacaattcacttcttgggcagacttatggaaaccagaatttgcaaacaaagttcagttattagacgatgcgcgcgaagtattcaacatcgctttattgaaaattggtcaagatccaaatactcaagatccagccattatcaaacaagcctatgaagaattattgaaattacgtccaaatgtactttctttcaattccgataacccagctaactcgttcatttcaggtgaagtggaagtgggtcaattatggaatggttcggtacgtattgctaaaaaagaaaaagcacctttaaatatggtattcccaaaagagggtcctgtactttgggttgatactcttgcaattcctgtaacagctaaaaatcctgaaggcgcacacaagctgattaactacatgttagggaaaaaaacagctgaaaaattaaccttagctatcggttacccaacctcaaatattgaagcgaaaaaagcattaccaaaagaaatcactgaagatccagcgatttatccgtcagctgatatattaaaaaatagtcactggcaagatgacgttggcgatgcaattcaattctatgaacaatattatcaagaattaaaagcagcaaaataa

SEQ ID NO: 2846 - protein, 360 aa, Haemophilus influenzae
MKKFAGLITASFVAATLTACNDKDAKQETAKATAAANDTVYLYTWTEYVPDGLLDEFTKETGIKVIVSSLESNETMYAKLKTQGESGGYDVIAPSNYFVSKMAREGMLKELDHSKLPVLKELDPDWLNKPYDKGNKYSLPQLLGAPGIAFNTNTYKGEQFTSWADLWKPEFANKVQLLDDAREVFNIALLKIGQDPNTQDPAIIKQAYEELLKLRPNVLSFNSDNPANSFISGEVEVGQLWNGSVRIAKKEKAPLNMVFPKEGPVLWVDTLAIPVTAKNPEGAHKLINYMLGKKTAEKLTLAIGYPTSNIEAKKALPKEITEDPAIYPSADILKNSHWQDDVGDAIQFYEQYYQELKAAK

SEQ ID NO: 2847 - DNA, 771 bp, Haemophilus influenzae
atgagtcgtttactacgtaatgcatttatgtttgtggtatacgcttatttgtatatcccaattattattttagtcactaattcctttaacaaagatcgttatggtttgagttggaaaggttttagctggaactggtacgagcgtttatttaataacgacaccttaatacaagctgcgattcattcggtaactattgcattttttgcggctaccctagctactattgtaggtggattaactgcaatcgcactttatcgctatcgattccgcggtaaacaagcagtaagcggtatgctatttatcgttatgatgtctccagatattgtaatggcagtatctttacttgcattatttatggttgtgggtatttcattgggcttctggtctttactacttgcccacgtaactttctgtttaccgtatgtgaccgtaactatcttctctcgcttaaatggctttgattccagaatgttagaagcggcgaaagacttaggtgcaagcgaagtgaccattttacgtaaaattatccttcctttagcattacctgcagttgtatctggttggttattaagtttcactatttcattagatgatgttgtggtttcatcatttgtcagtggtgtaagttatgaaatcttaccattgagaatattctctctagtgaaaactggtgtaacacctgaagttaatgctttagcaacgattatgatcgtgctttcattagctcttgtcgttttaagccagctaattacacgaaaaaataaccattaa

SEQ ID NO: 2848 - protein, 256 aa, Haemophilus influenzae
MSRLLRNAFMFVVYAYLYIPIIILVTNSFNKDRYGLSWKGFSWNWYERLFNNDTLIQAAIHSVTIAFFAATLATIVGGLTAIALYRYRFRGKQAVSGMLFIVMMSPDIVMAVSLLALFMVVGISLGFWSLLLAHVTFCLPYVTVTIFSRLNGFDSRMLEAAKDLGASEVTILRKIILPLALPAVVSGWLLSFTISLDDVVVSSFVSGVSYEILPLRIFSLVKTGVTPEVNALATIMIVLSLALVVLSQLITRKNNH

SEQ ID NO: 2849 - DNA, 861 bp, Haemophilus influenzae
atgaagataatcaataataaattccagaaaattactgttgcgattatcttcagttggctaatcttctttgtgctgattccaaacttattggtacttgccgtaagttttctgactcgagatggtagcaacttttatgcattcccaattactattgaaaactatacaaacttgtttaatccgctttatgcacaagttgtgtggaattcattgtctatgtcgggcatcgccaccattatttgcttactaataggttatccatttgcttttatgatgagtaaaattcatcctaaatatcgaccgctcttattgttccttgtggttttaccattttggacaaactcgttaattcgtatttatggaatgaaggtatttcttggcgtgaaaggcatacttaacacgatgttaattgatatgggaattttgagtgcgccaattcgtattttgaataccgaaattgcggtaatcattggcttagtttatttactattgccatttatgattttgccactctactctgccattgaaaaactagatcatcgtttattagaagcagcacgagacttaggtgcaaatacgttccaacgtttcttccgagtgattttaccattaactatgccaggcattatcgcaggctgtttattggtattattgccagcaatgggaatgttttatgtagcagacctacttggtggagcaaaagtattgcttgttggtaacgtaattaagagcgaattcttaatttctcgtaactggccatttggttctgcagtcagtattggtttaactgttctaatggcattgttgattttcgtgtactaccgagcaaacaaactattaaataagaaagtggagttagaataa

SEQ ID NO: 2850 - protein, 286 aa, Haemophilus influenzae
MKIINNKFQKITVAIIFSWLIFFVLIPNLLVLAVSFLTRDGSNFYAFPITIENYTNLFNPLYAQVVWNSLSMSGIATIICLLIGYPFAFMMSKIHPKYRPLLLFLVVLPFWTNSLIRIYGMKVFLGVKGILNTMLIDMGILSAPIRILNTEIAVIIGLVYLLLPFMILPLYSAIEKLDHRLLEAARDLGANTFQRFFRVILPLTMPGIIAGCLLVLLPAMGMFYVADLLGGAKVLLVGNVIKSEFLISRNWPFGSAVSIGLTVLMALLIFVYYRANKLLNKKVELE

SEQ ID NO: 2851 - DNA, 1119 bp, Haemophilus influenzae
gtggaaaatcagcttcaaaacaagcctattattgagcttcgttcaatcaaaaaatcctatggttctaacaccattattaacgatttcaatcttacaattaataacggtgagtttgtcactattcttggcccttcaggctgtggtaaaaccacagttttacgcttacttgcaggcttagaagaattggattcaggtagcattattttagatggtgaagatatcaccaatgtgccagcggaaaaacgtcatattaatacggtattccaaagctatgcgctatttccacatatgacaatttttgagaacgtggctttcggtttgcgtatgcaaaaagtaccaaacgaggaaattaaaccgcgtgttttagaagccttgcgtatggtacagctagaagaaatggcggatcgtaagccaactcaactttctggcggacaacaacaacgtattgccatcgctcgtgccgtagtaaataaaccaaaagtgttgttacttgatgagtctttatctgcattggattacaaattgcgtaaacaaatgcaacaagaactcaaaatgttacaacgtcagcttggcattacctttattttcgtcacccacgatcaagaagaagcaattacaatgtctgatcgtattgtattattgcgtaaaggtaaaatcgcacaggatggttctccacgtgaaatctatgaagatccagctaacttattcgttgctcgtttcattggcgaaattaacgtatttgaagccactgtgattgaacgaaaatcagaacaagttgtactggcaaatgttgaaggtcgtatttgtgatatttatacggatatgcctgtggaaaaagatcaaaaacttcaagtactccttcgccctgaagatattgtgattgaagaattagatgaaaatgaacattctaaagcaattatcggtcatattattgaccgcacttataaaggaatgacattagaatcaacggtagagtttgatcataacggaatgcgtgtccttgtaagtgaattctttaatgaagatgatccacatatggatcatagcataggacaacgcgtaggtatcacatggcacgaaggctgggaggttgtactcaacgatgaagataatcaataa

SEQ ID NO: 2852 - protein, 372 aa, Haemophilus influenzae
MENQLQNKPIIELRSIKKSYGSNTIINDFNLTINNGEFVTILGPSGCGKTTVLRLLAGLEELDSGSIILDGEDITNVPAEKRHINTVFQSYALFPHMTIFENVAFGLRMQKVPNEEIKPRVLEALRMVQLEEMADRKPTQLSGGQQQRIAIARAVVNKPKVLLLDESLSALDYKLRKQMQQELKMLQRQLGITFIFVTHDQEEAITMSDRIVLLRKGKIAQDGSPREIYEDPANLFVARFIGEINVFEATVIERKSEQVVLANVEGRICDIYTDMPVEKDQKLQVLLRPEDIVIEELDENEHSKAIIGHIIDRTYKGMTLESTVEFDHNGMRVLVSEFFNEDDPHMDHSIGQRVGITWHEGWEVVLNDEDNQ

SEQ ID NO: 2853 - DNA, 1239 bp, Haemophilus influenzae
atgatttctcaaatagataaaatagaacttttagaacgatttttacattatgtgtcttttcacacccaatcaaaacctcatgcgaagcattcccccagctcagtcgggcaaatgaagttagccatgcagttgcaaaaagaattaatccaacttggtttggagaatgttgaagtaagtaaatatgcagtggtaacagcatttttacccgctaatgatcctaacttaacgaaaaccattggtttagttgcgcatcttgatacgtctccacaatgtagtggtaaaaatgtacgcccagaagtgatagaagaatatcgtggcggagatattgcattaggtattggcgaggaatttattagccctgtttattattcttttatgcaaaaattagtcggacaaacgcttattgttactgatggaaccactttgcttggggctgacaataaagcgggaattgcagaaattatgaccgcactttccattcttcaaaaagagaatattccccattgcaatattcgtgttgcttttacgcctgatgaagaaattggtttgggaatccattatttcccaatggaaaagttttcctgtgattgggcatataccattgatgggggagaagtaggggaattagaatacgaaaactttaatgctgcaacggcaaaagtgcggtttttcgggcgaaatattcacacaggttatgcaaaaggaaaaatgctgaatgcactgactttagcttgtgaatttcagcaagtttttcctgttgatgaagtaccagaaaaaaccgatgggaaagcgggcttttatcatttagaagatttttctggcgatattgagcaagtagagcttacctatttgattcgtgattttgacgaacagaatttcgcacaaagaaaagcttttattaaaaatcaggtggaaaaatttaatgctaaaaaaggtttgaaaaagcctatagagttagaaattcaagatagctaccaaaatatgtatgatgtggtaaaaaatgttcctcaatcaattgaacttgctgatcgcgcaatgaaagcggtgggaattaaaccaaatcataagccgattcgaggcggtacagatggggcatttttagcctctaaaggtttagcatgcccaaatatttttactggtggctataatttccatagtaaacacgagttggtttctttacaaggcatggaaaatactgtccaagtaattatcgaaatgctgaaatgtaaagatttgtaa

SEQ ID NO: 2854 - protein, 412 aa, Haemophilus influenzae
MISQIDKIELLERFLHYVSFHTQSKPHAKHSPSSVGQMKLAMQLQKELIQLGLENVEVSKYAVVTAFLPANDPNLTKTIGLVAHLDTSPQCSGKNVRPEVIEEYRGGDIALGIGEEFISPVYYSFMQKLVGQTLIVTDGTTLLGADNKAGIAEIMTALSILQKENIPHCNIRVAFTPDEEIGLGIHYFPMEKFSCDWAYTIDGGEVGELEYENFNAATAKVRFFGRNIHTGYAKGKMLNALTLACEFQQVFPVDEVPEKTDGKAGFYHLEDFSGDIEQVELTYLIRDFDEQNFAQRKAFIKNQVEKFNAKKGLKKPIELEIQDSYQNMYDVVKNVPQSIELADRAMKAVGIKPNHKPIRGGTDGAFLASKGLACPNIFTGGYNFHSKHELVSLQGMENTVQVIIEMLKCKDL

SEQ ID NO: 2855 - DNA, 483 bp, Haemophilus influenzae
atgtcaaaaacatcaatcggactagataaagttcaatcagcagaattagccgataaacttaacgaattacttgcaacctaccaagttttctatactaatgtacggggctaccactggaacattaaaggcgtaaacttctttgcattacacgcaaaatttgaagaaatttatactaatttagttgctagagtagatgaggtggctgaacgtattttaactttaggttacacaccaaataatgcttacagccaatacttaaaaatatctcgaattaaagaagatattgcagtaagtgaggcacaagaatgtttatcaggcacattacaaggtctaaaaacattactagatcaacaacgtgaaattcttgcttttgcaaataacgctaatgatgaaggtactgcatcacaaatgagtgactatattaaagaacaagaaaaattagtatggatgttccaagcagcgtgccaaacttgccataattaa

SEQ ID NO: 2856 - protein, 160 aa, Haemophilus influenzae
MSKTSIGLDKVQSAELADKLNELLATYQVFYTNVRGYHWNIKGVNFFALHAKFEEIYTNLVARVDEVAERILTLGYTPNNAYSQYLKISRIKEDIAVSEAQECLSGTLQGLKTLLDQQREILAFANNANDEGTASQMSDYIKEQEKLVWMFQAACQTCHN

SEQ ID NO: 2857 - DNA, 879 bp, Haemophilus influenzae
atgcaagaacttattaagcgcaccttgccacaagatgatgcacttaatcaagctattgtgaatgaacttcgttcacaaaattgggctggttttttaaattattcccaagtgcagcagctttgtcataattttgaacttaccccactaaaattggctatgcacttgttgccacttgctgcaagttatagtcatactgctatttctcattttaatgtgggggcaattgctattggcgaacaaggggatttttatttcggcgcgaatcaagaatttgctaattcagccattcagcaaacgattcacgcggaacaaagtgcaatttctcacgcttggttgcgtaatgaacgccgtatttcagatatggtagtcaattacacgccgtgcggacattgtcgtcaatttatgaatgaattgcacggtgctgaaaaaatttcaattcatttgccgcatagccaaaataatccattacattcttatttaccggatgcttttgggccaaaagatctcgatattgcagcgcatcttttggcggatgaaaatcatgatttagttgctgatcatcaagatgatttggttaatcaagctattttagcggcaaatcaatctcattgtccttattcaaatagtccgcacggcattgcgattttatttaaaaatggtgatgtggtgacaggacgttatgcagaaaacgccgcatttaatccaagtttgccagcgttgcaaaccgcacttaattttgcgtatttaaatgataaaaaattgagtgatattgaacgaatagtgatggctgaaaaagcattaaaattgagccataaaacgatggctgaaaccttattatccacattaacttcagtagaattagagtattattctttgtaa

SEQ ID NO: 2858 - protein, 292 aa, Haemophilus influenzae
MQELIKRTLPQDDALNQAIVNELRSQNWAGFLNYSQVQQLCHNFELTPLKLAMHLLPLAASYSHTAISHFNVGAIAIGEQGDFYFGANQEFANSAIQQTIHAEQSAISHAWLRNERRISDMVVNYTPCGHCRQFMNELHGAEKISIHLPHSQNNPLHSYLPDAFGPKDLDIAAHLLADENHDLVADHQDDLVNQAILAANQSHCPYSNSPHGIAILFKNGDVVTGRYAENAAFNPSLPALQTALNFAYLNDKKLSDIERIVMAEKALKLSHKTMAETLLSTLTSVELEYYSL

SEQ ID NO: 2859 - DNA, 966 bp, Haemophilus influenzae
atgatcgactttcgccctttttatcaacaaattgctactacaaatttatcagactggttagagaccttaccgtgccaattgaaagaatgggaaactcaaactcatggcgattatgcgaaatggagcaaaattgttgattttctacctgatttacatgctgatgaaatcgatctaaaaagtgcggtgaaatctgaccgcacttctcccctttcagaaggtgaaaaacaacgaattatccatcatttaaaacaattaatgccgtggcgaaaagggccttatcatcttttcggtattcatgtagattgtgaatggcgttcagattttaaatgggatcgtgttcttcctcatttagctcccctgcaaggtcgcactattttagacgtgggttgtggcagcggttatcatatgtggagaatggtaggcgaaggcgcaaaaatggtggtcgggattgatcctaccgagcttttcctttgccaatttgaagctgtacgcaaactgcttaataatgatcgtcgagcaaatcttatcccacttggtattgagcaaatgcaaccattagcggcatttgacactgtattttcaatgggcgtactctatcatcgtaaatccccattagatcatttaagccaattgaaaaatcaattggtaaaaggtggcgaattggtattagaaacattagtggtggatggcgatgtaaatactgtgcttgtaccagcagatcgctatgcgaaaatgaaaaatgtttattttatcccctctgtcgccgcactaattaactggctagaaaaagttggctttaccaacgtacgttgtgtggatgtagcgacaactacattagaagaacagcgtaaaactgattggttggaaaatgaaagcctaattgattttttagatccaaacgatcacagtaaaaccattgaaggttatcaagcaccgaaaagagcggtaattttagcgaacaaataa

SEQ ID NO: 2860 - protein, 321 aa, Haemophilus influenzae
MIDFRPFYQQIATTNLSDWLETLPCQLKEWETQTHGDYAKWSKIVDFLPDLHADEIDLKSAVKSDRTSPLSEGEKQRIIHHLKQLMPWRKGPYHLFGIHVDCEWRSDFKWDRVLPHLAPLQGRTILDVGCGSGYHMWRMVGEGAKMVVGIDPTELFLCQFEAVRKLLNNDRRANLIPLGIEQMQPLAAFDTVFSMGVLYHRKSPLDHLSQLKNQLVKGGELVLETLVVDGDVNTVLVPADRYAKMKNVYFIPSVAALINWLEKVGFTNVRCVDVATTTLEEQRKTDWLENESLIDFLDPNDHSKTIEGYQAPKRAVILANK

SEQ ID NO: 2861 - DNA, 1515 bp, Haemophilus influenzae
atgtttggattcgacccaactcttattacttttactatttatattttcgggatgttgctgattggcgtactcgcctattattacacgaataatttatcagattacattctcggtggacgtcgtttaggcagttttgttactgcaatgtctgctggtgcttcagatatgtctggttggcttttaatgggcttacctggtgcggtatatttatcaggcttagttgaaggctggattgctattggtttaactatcggggcttattttaactggcttttagtggctggtcgtttgcgtgtttatacagaattaaataataatgcgctcactctcccagaatattttcacaatcgttttggttcatcacacaaattattaaaacttgtttctgccactattattttagtgttttttactatttattgtgcttctggtgtcgtggctggcgcaaaattattccaaaatatattttctgtggaatattccaccgcactttggtacggcgcagcggcaaccattgcttacacgttcatcggaggtttcctcgcggtaagctggacagataccattcaagccacattaatgatttttgcattaattttaacccctgtttttgtgttattgagtttcgccgataccgctcaattttccgcagtactagaacaagctgaggctgccgtaaataaagatttcacggatttatttacttctaccacaccacttggtttattaagtcttgcggcttggggattaggctatttcgggcaaccgcatattttagcacgctttatggctgcggattctgtcaaatcacttatcaaagcacgtcgtattagtatgggttggatggtgctttgcttaggaggcgcaattggcattggcttattcgctattccgtatttctttgccaatccagctattgcaggcacagtcaataatgaaccagagcaagtatttattgaacttgctaaacttttgtttaatccttggatcgcgggcatattactttccgctattttagccgctgtaatgagtacattaagcgcgcaattgttaatttcttcaagctcaatcacagaagatttctataaaggttttattcgccctaacgcatctgaaaaagagctcgtatggcttggcagaattatggtgttagttattgccgcacttgctatctggatcgcacaagatgaaaacagcaaagtattaaaacttgtagaattcgcttgggctggttttggtagtgcatttggccctgttgtacttttctctcttttctggaaacgaatgacatcatcgggcgcaatggcgggtatgcttgtaggcgcagtgacagtatttgcttggaaagaagttgttccagcggatactgattggtttaaagtatatgaaatgatcccaggctttgctttcgccagccttgcaattattgttatttcattactttccaataaaccagaacaagatattcttaatacctttgataaagcagaaaaggcttataaggaagcaaaatga

SEQ ID NO: 2862 - protein, 504 aa, Haemophilus influenzae
MFGFDPTLITFTIYIFGMLLIGVLAYYYTNNLSDYILGGRRLGSFVTAMSAGASDMSGWLLMGLPGAVYLSGLVEGWIAIGLTIGAYFNWLLVAGRLRVYTELNNNALTLPEYFHNRFGSSHKLLKLVSATIILVFFTIYCASGVVAGAKLFQNIFSVEYSTALWYGAAATIAYTFIGGFLAVSWTDTIQATLMIFALILTPVFVLLSFADTAQFSAVLEQAEAAVNKDFTDLFTSTTPLGLLSLAAWGLGYFGQPHILARFMAADSVKSLIKARRISMGWMVLCLGGAIGIGLFAIPYFFANPAIAGTVNNEPEQVFIELAKLLFNPWIAGILLSAILAAVMSTLSAQLLISSSSITEDFYKGFIRPNASEKELVWLGRIMVLVIAALAIWIAQDENSKVLKLVEFAWAGFGSAFGPVVLFSLFWKRMTSSGAMAGMLVGAVTVFAWKEVVPADTDWFKVYEMIPGFAFASLAIIVISLLSNKPEQDILNTFDKAEKAYKEAK

SEQ ID NO: 2863 - DNA, 1476 bp, Haemophilus influenzae
atggatgctgtcgagttattgatgaacgtaacgcctaacgaaacacgcattgcgctagtcgaaacaggaatgttgcgcgaagtgcatattgaacgccaagctaaacgaggaattgtcggaaatatttataaaggtcgtgtcactcgagtgttaccaggaatgcagtcggcttttgttgatattggtttggaaaaatcggcttttttacacgctgcggacattgtatcccatacagaatgtgtagatgaaaatgaacaaaagcaatttaaagttaagagcatttcagaattagtacgagaagggcaggatattgttgtacaagtggtgaaagatccccttggtacaaaaggcgcgcgtttaaccacagacatcacattgccatcacgttatcttgtttttatgccagaaaatagccacgtaggcgtttcacaacgtattgaaagcgaagaagagcgcgcccgtttaaaagcgttggttgaacctttttgtgatgaactcggcggttttattattcgtaccgccacagaaggggcaagcgaagaagaattacgtcaagacgctgaatttttaaaacgcttatggcgtaaagttttagaacgtaaatctaaatatccaaccaaatcaaaaatttacggcgagccagcacttccgcaacgcattttgcgtgattttatcggcacaaacttagaaaaaattcgtatcgactctaaactttgctttggcgaagtaaaagagtttaccgatgaatttatgcctgaattaagcgataaacttgttctttattctggcaatcaacctatctttgatgtgtacggggttgaaaatgcgatccaaacagccttagataaacgtgttaatctcaaatcgggtggctatttaattatcgagcaaacagaagcgatgaccaccattgatattaatacaggtgcatttgtggggcatcgtaatctagaagaaaccatcttcaatactaatattgaagcaactaaagccattgcgcagcaattacaactacgtaatcttggtggcataatcattattgattttattgatatgcaaacagatgaacatcgcaatcgagtattgcaatctttatgtgatgcactttctaaagatcgtatgaaaactaatgtgaatggctttacgcaattaggccttgtagaaatgactcgtaaaagaacccgcgaaagccttgaacacgtgctatgcgatgaatgtccaacttgtcatggacgtggtcgggtgaaaactgttgagacagtttgctacgaaattatgcgtgaaattattcgggtgtatcatttattcagtagtgaacaatttgttgtttatgcctcgccagcagtttccgaataccttattaatgaagaatctcacggtttactgccagaagtggaaatgtttattggaaaacgagtaaaagtaaaaacagaacagttttataaccaagaacagtttgatgtggttgtaatgtaa

SEQ ID NO: 2864 - protein, 491 aa, Haemophilus influenzae
MDAVELLMNVTPNETRIALVETGMLREVHIERQAKRGIVGNIYKGRVTRVLPGMQSAFVDIGLEKSAFLHAADIVSHTECVDENEQKQFKVKSISELVREGQDIVVQVVKDPLGTKGARLTTDITLPSRYLVFMPENSHVGVSQRIESEEERARLKALVEPFCDELGGFIIRTATEGASEEELRQDAEFLKRLWRKVLERKSKYPTKSKIYGEPALPQRILRDFIGTNLEKIRIDSKLCFGEVKEFTDEFMPELSDKLVLYSGNQPIFDVYGVENAIQTALDKRVNLKSGGYLIIEQTEAMTTIDINTGAFVGHRNLEETIFNTNIEATKAIAQQLQLRNLGGIIIIDFIDMQTDEHRNRVLQSLCDALSKDRMKTNVNGFTQLGLVEMTRKRTRESLEHVLCDECPTCHGRGRVKTVETVCYEIMREIIRVYHLFSSEQFVVYASPAVSEYLINEESHGLLPEVEMFIGKRVKVKTEQFYNQEQFDVVVM

SEQ ID NO: 2865 - DNA, 1674 bp, Haemophilus influenzae
atgatgagccatacagagacatctttgggtgcggaaaatacccgcactcacaattttattacccaaattattgatgaagatttagcttcgggtaaacataaaagcgttcatacccgttttccgccagagccgaatggctatttgcatattggtcacgcaaagtctatttgcttgaattttggcttggcaaaagaataccaaggtttatgtaacctacgttttgacgataccaatccagtaaaagaagacgtggaatatgtagattctatcaaagcggatgtggaatggttaggttttaaatgggagggcgaaccgcgttatgcatctgattacttcgatgcgctttatggctatgcgattgaattgattaaaaaaggcttggcgtatgtggatgagctttctccagaagaaatgcgtgaatatcgtggtaccttaaccgaacctggtaaaaacagcccatatcgtgaccgcactattgaagaaaacttagcgttatttgaaaaaatgaagaacggtgagtttgcagaggggaaagcaagtttacgtgcaaaaattgatatggcatcgccatttatggtcatgcgtgatccagtaatttatcgtattaaattcgctagccatcaccaaacaggtgacaaatggtgtatttacccaatgtacgatttcactcactgtatctctgatgcaatcgaacgtatcactcattcaatctgtacattagaattccaagataaccgtcgtttatatgattgggtgttggaaaatatcagtattgaacgtccattaccgcatcaatatgaattttcacgtttaaatttagaaggcacattgacgtctaaacgtaagttattgaaattagtaaacgacggtattgtagatggttggaatgatcctcgcatgccaaccatttcaggtttacgccgtcgtggttatacaccagcttcgttacgtgaattttgtcgccgtattggtgtgactaaacaagataacgtggtggaatattctgcacttgaagcctgcattcgtgaggatttaaatgaaaatgcaccacgcgcaatggcagtgattgagcctgttcgtgtggtgattgaaaactttgaaagcgaagcggttttaactgccccaaatcatccaaatcgtcctgaattaggggagcgtcaattgccgtttacgaaagaactttatattgatcgagctgacttccgtgaagaagcgaacaaacaatataaacgtttagtattaggtaaagaagtgcgtttgcgtaacgcttatgtgattaaagcggaacgtgtggaaaaaaatgaaagtggcgaaatcaccacgattttctgtacttacgatcctgaaactttaggtaaaaatccatcagatggacgtaaagtgaaaggtgtcattcattgggtttctgcggttaataatcatccagctgaattccgtttgtatgatcgcttatttactgtgccaaatccaggggctgaagatgatatcgaaagcgtgttaaacccaaattctttagtgataaaacaaggttttgtagagcaaagcctcgcaaatgcagaagcagagaaaggctaccaatttgaacgtgagggttatttctgtgcagatagtaaagatagccgacctgaacatttggtatttaacttaacagtaagcttaaaagaaggcttctaa

SEQ ID NO: 2866 - protein, 557 aa, Haemophilus influenzae
MMSHTETSLGAENTRTHNFITQIIDEDLASGKHKSVHTRFPPEPNGYLHIGHAKSICLNFGLAKEYQGLCNLRFDDTNPVKEDVEYVDSIKADVEWLGFKWEGEPRYASDYFDALYGYAIELIKKGLAYVDELSPEEMREYRGTLTEPGKNSPYRDRTIEENLALFEKMKNGEFAEGKASLRAKIDMASPFMVMRDPVIYRIKFASHHQTGDKWCIYPMYDFTHCISDAIERITHSICTLEFQDNRRLYDWVLENISIERPLPHQYEFSRLNLEGTLTSKRKLLKLVNDGIVDGWNDPRMPTISGLRRRGYTPASLREFCRRIGVTKQDNVVEYSALEACIREDLNENAPRAMAVIEPVRVVIENFESEAVLTAPNHPNRPELGERQLPFTKELYIDRADFREEANKQYKRLVLGKEVRLRNAYVIKAERVEKNESGEITTIFCTYDPETLGKNPSDGRKVKGVIHWVSAVNNHPAEFRLYDRLFTVPNPGAEDDIESVLNPNSLVIKQGFVEQSLANAEAEKGYQFEREGYFCADSKDSRPEHLVFNLTVSLKEGF

SEQ ID NO: 2867 - DNA, 465 bp, Haemophilus influenzae
atgcaatccaatatgcaacttgaacccaatttctggcaaaccaaatccctgctagaaatgactgaatctgaatgggaagccttatgtgatggctgcggcaaatgctgttatcgcaaatatattcaagggcgaggtaaacgccaaaaactctattacacccgaattgcttgtaatcttttagatctggaaacaggaaagtgcggtaattattcagagcgttttaacattgaaaccgattgcaccaaactcaccaaaaagaatttacctgattttcattggctgcctgatacttgtgcctatcgtttgctttatgaaggaaaaacgctacccgaatggcatccgcttatttctggctctccccattctgtaaaaaatgcggatattttgattaaaaatggtatccacgaacgagatgtgattgattggtttgagtttattattgacgaagatcacacttttaaataa

SEQ ID NO: 2868 - protein, 154 aa, Haemophilus influenzae
MQSNMQLEPNFWQTKSLLEMTESEWEALCDGCGKCCYRKYIQGRGKRQKLYYTRIACNLLDLETGKCGNYSERFNIETDCTKLTKKNLPDFHWLPDTCAYRLLYEGKTLPEWHPLISGSPHSVKNADILIKNGIHERDVIDWFEFIIDEDHTFK

SEQ ID NO: 2869 - DNA, 2091 bp, Haemophilus influenzae
atgcaaatctcggattctctcaaacaaaaagcagaaaaatgcggtatcgcgctttctcactatgatattgatggacatcttattttcgcggatgaaaagacggtttcaacttttgttgagcttttgcagcctccgccaaaagcgaaaggacagtttgacgatgtactggctgcatttgaaaatgaaccgattgactatcgactcaatcgtctagatctcccaccatctgcggaatatcgttatcagctgattgatgaatctaatgctattctgttagaaaaaatactttcaaatttatccgcactttctttgcctccacttccttttggctattatcaattatctattttttccgatactgaacagtaccgcattcgtttacttatttctcctaaaacagcttttcaaccatccgtattaaaaaataaaaaagtgtggggcgtgaatgtgcaactttacagtttacgctcagaacaaaactgggggattggcgattttggcgatttggcctatttgattgaacaaagtgcaaaacaaggggcggattatgtgggaattaatccattacatttgccatatcctgctgtgccaaactgggctagtccttatagttcatcttcccgtcgttggttgaatttcttatatttggacattcctgatttacccgaatttaagcgttgccgttcagtacaaaattggtttaagcgtgaggatattcaagcaaaaattgctgctttacgtgaaagtgattgcgtcgattattcttcaatattggctttaaaattaaccgcacttgagtccctgtttgatttctttcagcgtagtcaatccgctgaaattgtgacacgtcgaaaaatctttgctgattatttaaaaaacaaaggtgaacctttgttgttacagggtttatttaatgtcttggatttgcaagaacacgccgatcatcaagcagaagaaaataccattggttggcttggctggcgtaaggaatggcaacatttaagtacggcaaaaagaaaagccttattaaaaacacgccatgagaaaatccaattttttgcttggttgcaatggcttacagaagaacaactttccgcattacaaaatctttgtaaacagtctggtatggagttggggatttatggcgatttagccgtaaatagttctcgtggcagtgctgatgtatggagcgatcctgatttatattgtgtaaatgcctctattggtgcgccgcccgatccgttaggccctgtaggacaaaattggaatttgccaccttataatccaaccgtgctaaaagcacgtggctttgcaccatttatcgatatgctacgtgccaatatgcaatatttcggtgtgcttcgcatcgatcatgttatgggcttatttcgtttgtggtggattccaaaaggaaaaactgcggctgacggtgcttatgtgcattatccttttgatgaattaatggctattcttgccattgaaagtgtacgcaatgaatgtttgattatcggtgaagatctcggcactgtgcctgatgaagtgcggtggaaattaaacgagtttcaaattttctcttattttgtgttgtatttcgcccaacgaaatggcgaatttcctcgtatatctgattatcctcgaaatgcttatgccactattggtacacatgatgttccctcattacaaagtttttggcattgtcgtgatttagaattatttaatcaactcggtattctgaatggggaagtgctcaagcaaaaatatgatcaacgtgtcatggataaacaagccttattaaatagtttgcatcgtgataattatttaccgacgcattatgagggcgatgcgctttctatggcgatgcacgattatttaaatcgaatgatccattattatttagcggaaagtaacagccgattgattggtgtgcaattagaaaatttacttagccaagaaatcagttttaatttaccgagcacctcaaatgaatacccaaactggtgcaagaaacttgctcaaccgttagcgtttatttttagcaatgaagctttaaaaacgttctttgtgcaaattaaccaagggcgaaatgtataa

SEQ ID NO: 2870 - protein, 696 aa, Haemophilus influenzae
MQISDSLKQKAEKCGIALSHYDIDGHLIFADEKTVSTFVELLQPPPKAKGQFDDVLAAFENEPIDYRLNRLDLPPSAEYRYQLIDESNAILLEKILSNLSALSLPPLPFGYYQLSIFSDTEQYRIRLLISPKTAFQPSVLKNKKVWGVNVQLYSLRSEQNWGIGDFGDLAYLIEQSAKQGADYVGINPLHLPYPAVPNWASPYSSSSRRWLNFLYLDIPDLPEFKRCRSVQNWFKREDIQAKIAALRESDCVDYSSILALKLTALESLFDFFQRSQSAEIVTRRKIFADYLKNKGEPLLLQGLFNVLDLQEHADHQAEENTIGWLGWRKEWQHLSTAKRKALLKTRHEKIQFFAWLQWLTEEQLSALQNLCKQSGMELGIYGDLAVNSSRGSADVWSDPDLYCVNASIGAPPDPLGPVGQNWNLPPYNPTVLKARGFAPFIDMLRANMQYFGVLRIDHVMGLFRLWWIPKGKTAADGAYVHYPFDELMAILAIESVRNECLIIGEDLGTVPDEVRWKLNEFQIFSYFVLYFAQRNGEFPRISDYPRNAYATIGTHDVPSLQSFWHCRDLELFNQLGILNGEVLKQKYDQRVMDKQALLNSLHRDNYLPTHYEGDALSMAMHDYLNRMIHYYLAESNSRLIGVQLENLLSQEISFNLPSTSNEYPNWCKKLAQPLAFIFSNEALKTFFVQINQGRNV

SEQ ID NO: 2871 - DNA, 2193 bp, Haemophilus influenzae
atgacaaccgcagtaacacaagcaattattgatggtttttttgatgcgagcaatggtgatccttttgctacgcttggtatgcacgaaaccgagcaaggaattgaaatccgtacgttattgccagatgccaatcgaatggtggtgattgagcgtgaaagtggtaaagaaataacggaactggattgtgtcgatgagcgtggattttttgttggtgttattccaaattgtcgtcaattttttgcttatcaattacaggttttttggggtaatgaagcacaaattatcgaagatccttatcgttttcatccaatgattgacgatttagaacaatggctacttgctgaaggttcgatgcttcgcccctatgaagtgcttggtgcgcattttatggaatgtgatggtgtgagcggggtgaatttccgcttgtgggcacctaatgcaagacgagtttctattgtaggcgatttcaactattgggatggtcgccgtcatcctatgcgttttcatataaaaagtggtgtttgggagctctttttaccaaaagccagtttaggacagctctataagtttgaattaattgattgccatggcaatcttcgtttgaaggccgatccttatgcctttagttcgcaacttcgccctgatacagcttcgcaagtcagtgccttgccaaatgtagtggaaatgactgaagcacgcaaaaaagcaaaccaaggcaaccaaccaatttctatttatgaagtgcatttaggatcttggcgtcgtaatttagaaaacaatttttggctagattacgatcaaattgctgatgaattaattccttatgtaaaagagatgggcttcacccatatagaatttttaccgctttctgaatttccatttgatggttcttggggctatcaaccacttggactttattcgccaaccagtcgttttggctcacctgaggcatttcgccgtttagtaaaacgtgctcacgaagctggcatcaacgtgattttagattgggtgccaggacatttcccaagtgatacgcatggtttagttgcatttgatggcacagccttgtatgaacatgaagaccctcgtgaaggctatcatcaagattggaataccttgatttataactatgggcgtaatgaggtcaagaatttcttatccagtaatgcactgtattggcttgaacgttttggcgtagatggtattcgcgtggatgctgtggcttccatgatttaccgtgattatagccgtgtggagggcgagtggattccaaaccaatacggcggacgtgaaaacttagaagccattgaatttttaaaacacaccaactggaaaattcacagtgaaatggcgggtgcaatttctattgcggaggaatctacctcttttgcaggcgtaacccacccaagcgaaaatggtggattgggctttaattttaaatggaatatgggctggatgaacgacacgcttgcttatatgaagctcgatccgatttaccgccaatatcatcacaacaaaatgacctttggaatggtatatcaatacagcgaaaattttgttctaccactttctcacgatgaagtggttcacggtaaatattcacttcttggcaagatgccgggcgatacatggcaaaaattcgctaacttgcgtgcatattacggttatatgtggggctacccaggcaaaaaattactctttatggggaatgaatttgctcaaggcagagaatggaattacgaagaaagtttggactggttcttgcttgatgaaaatattggcggaggctggcacaaaggcgtattgaagctggttaaagacctcaatcaaatttatcaaaaaaatcgaccgctctttgagctcgacaactccccagagggtttcgattggcttgtcgttgatgatgcggcaaattccgtgttcgcctttgaacgtcgcagttcaaacggagaacgtattattgtcgtcagtaactttacccctgtgcctcgccacgactaccgcatcggcgtgaatattgtgggcgaatatgaagaaattttgaataccgattcaatgtactatcaaggctcaaatgtgggcaattttggttgtgtcgcaagtgaaaatatcgaaagccacggacgagaaaattcgatttcagtgtccattccgccgttagcaacagtttatttgagattgaaggcgaaataa

SEQ ID NO: 2872 - protein, 730 aa, Haemophilus influenzae
MTTAVTQAIIDGFFDASNGDPFATLGMHETEQGIEIRTLLPDANRMVVIERESGKEITELDCVDERGFFVGVIPNCRQFFAYQLQVFWGNEAQIIEDPYRFHPMIDDLEQWLLAEGSMLRPYEVLGAHFMECDGVSGVNFRLWAPNARRVSIVGDFNYWDGRRHPMRFHIKSGVWELFLPKASLGQLYKFELIDCHGNLRLKADPYAFSSQLRPDTASQVSALPNVVEMTEARKKANQGNQPISIYEVHLGSWRRNLENNFWLDYDQIADELIPYVKEMGFTHIEFLPLSEFPFDGSWGYQPLGLYSPTSRFGSPEAFRRLVKRAHEAGINVILDWVPGHFPSDTHGLVAFDGTALYEHEDPREGYHQDWNTLIYNYGRNEVKNFLSSNALYWLERFGVDGIRVDAVASMIYRDYSRVEGEWIPNQYGGRENLEAIEFLKHTNWKIHSEMAGAISIAEESTSFAGVTHPSENGGLGFNFKWNMGWMNDTLAYMKLDPIYRQYHHNKMTFGMVYQYSENFVLPLSHDEVVHGKYSLLGKMPGDTWQKFANLRAYYGYMWGYPGKKLLFMGNEFAQGREWNYEESLDWFLLDENIGGGWHKGVLKLVKDLNQIYQKNRPLFELDNSPEGFDWLVVDDAANSVFAFERRSSNGERIIVVSNFTPVPRHDYRIGVNIVGEYEEILNTDSMYYQGSNVGNFGCVASENIESHGRENSISVSIPPLATVYLRLKAK

SEQ ID NO: 2873 - DNA, 1977 bp, Haemophilus influenzae
atgttcaaaatctacaacaatggcaatcctattccaatgggatactcacaagcggtcgaaaacaacgtgcaaattaccaatttcgtcctgttttccgctgcggcaataggcgtagaactttgcctttttgacgaacaaaatcaagaaacacgcttgccgatggtgcgtactgaaaatgtgtggcatttggcggtaactggcgtgaaaactggtacggaatatggatttcgtattcacggcgaatatgccaacccgaataaattaatgctcgatccctatgcgaaagccgtgaatggtaaacctgatttaagtagcgaagaaagttgttcttggttcttgctttcggataatcgcgacaacgcgcatcttgccccaagagcggttgtgatttcggaagattttaattgggaaaatgatactttatccaatacgccttgggctgaaaccattgtgtatgaattacacgttaaagggtttagccagttaaacgagaaaatccctgcggcgttgcgtggtacttatactggattagcacatcctgtgaatttggcgtatttgaaagaattaggcgtaactgcggtggagttgctgcctgtaaatttccatataaatgaaccgcacttacaggcacgaggcttacaaaattattggggatacaatcccttagcgatgtttgcggtggaacctaaatatgcggcaacaaataatccattagctgaatttaaagcgatggtaaaggcgtttcacaatgcgggcattgaagttattttagatgtggtgtttaaccattccgcagaatcagagcaaacttacccaacattcagccagcgtggtattgatgatcaaacttactattggcgcaacgatcaagggcgttatatcaattggacaggctgcggcaatatgctcaatttatcctctgatgtagggcgaaagtgggtggtggattgcctgcgttattgggtggagcaatgccacattgatggattccgttttgatttagcctcggtgcttgggcgtgatacacctgatttcaactcgtcagctcagctttttactgacataaaaaatgagccaagtttacaaaatattaaattgattgccgagccttgggatattggacattacggttatcaagtcggcaatttcccaagttattttgccgaatggaacgaccgattccgtgatgatctctgccgtttctggctatggaaaagtggcgaaattggtgcatttgcagaacgttttgcaggttctagcgatttatttaagaaaaatgaccgcttgccacatactacacttaattttattaccgctcacgatggttttacgcttaaagatttagtgagttacaaccaaaaacataatgaagcgaacggcgaagaaaatcacgacggcagaaacgaaaattacagttacaaccacggagtagaaggttctacagaatccctttctgaaccgcaaaaaagtgcggtggaaaataaccgcacttttgcacaaagtggattattaatgagtttattgctggcgaatggcgcacctatgcttttggcgggcgatgagttcggcaacactcaatatggtaacaataatgcttattgccaagataacgagattacttggctgaaatgggcaaattttaacgaagaattatttgaactgaccaaacaaacgattgcacttcgtaagcaaattggcagtttaaaccgagatcaatggtggtcggatgagaatgtgcaatggcttaacattgcaggcgaaccgatgacagttgaagattggcaaaatcaacaaaccaaagcattacaggtggttttagacaatcgttggcttttgttgattaatgccaaagccgaaggccaggtgtttcacttgcctaatgggaaatggaagccccaaatcggcacacataatgtaacccttgaagaacaagccgaacttagttcaatgggcttttgtatgctgaatgacgaataa

SEQ ID NO: 2874 - protein, 658 aa, Haemophilus influenzae
MFKIYNNGNPIPMGYSQAVENNVQITNFVLFSAAAIGVELCLFDEQNQETRLPMVRTENVWHLAVTGVKTGTEYGFRIHGEYANPNKLMLDPYAKAVNGKPDLSSEESCSWFLLSDNRDNAHLAPRAVVISEDFNWENDTLSNTPWAETIVYELHVKGFSQLNEKIPAALRGTYTGLAHPVNLAYLKELGVTAVELLPVNFHINEPHLQARGLQNYWGYNPLAMFAVEPKYAATNNPLAEFKAMVKAFHNAGIEVILDVVFNHSAESEQTYPTFSQRGIDDQTYYWRNDQGRYINWTGCGNMLNLSSDVGRKWVVDCLRYWVEQCHIDGFRFDLASVLGRDTPDFNSSAQLFTDIKNEPSLQNIKLIAEPWDIGHYGYQVGNFPSYFAEWNDRFRDDLCRFWLWKSGEIGAFAERFAGSSDLFKKNDRLPHTTLNFITAHDGFTLKDLVSYNQKHNEANGEENHDGRNENYSYNHGVEGSTESLSEPQKSAVENNRTFAQSGLLMSLLLANGAPMLLAGDEFGNTQYGNNNAYCQDNEITWLKWANFNEELFELTKQTIALRKQIGSLNRDQWWSDENVQWLNIAGEPMTVEDWQNQQTKALQVVLDNRWLLLINAKAEGQVFHLPNGKWKPQIGTHNVTLEEQAELSSMGFCMLNDE

SEQ ID NO: 2875 - DNA, 1302 bp, Haemophilus influenzae
atgaaatctggcgaccttaacaaatatgatttagttaaaaacactttggtgcttgttctcgcaggtggacgaggttcacgtttacacgaattgacagataaacgtgcaaaacctgcgctttattttggtggtaatcgtcgcattatcgattttgcactttctaattgtattaattcagatttaaaccgaattggggtcgtgactcaatatgcggcacactccttgcttcgtcatttgcaaacaggctggtctttcttaccgcaagagcgtggcgaatttattgatatgttgccagctcgtcagcaaattgacgattctacttggtatcgtggcacggcggatgcggtatatcaaaatatggctattattaaaaatcactatcgcccgaaatatattttgatcttagcgggcgaccatatttacaaacaagattacagcgtgatgttaatggatcacgtcaatagtggggcaaaatgtactgttggttgcattgaagtgccccgttctgaagcacacgaatttggcgtaatggctgtaaacgaaaacttgaaagtaaaagctttcgtggaaaaaccaaaagatccgccagcaatggtgggtaaacctgatgtttcgcttgcctcaatggggatttatgtgtttgatgcggattatctttataaaatgcttgagcaggaagttaataccccgcaaactagccatgatttcggtaaagatgtattgccaaaatgtttagaagaaggcgcgctttatgctcacccatttagccgttcttgcatgggacgcaacaccgagggcgaaatttactggcgtgatgtagggacacttgatagcttctggcaatctaatatcgacttagtctctgaaaatccacaattagatatttacgatcaaagctggccaattcgtggtaatcctattcaggcttatccatcaaaatttttctacaaacactccaatgtgcatcctgtagataactcacttatcggcggcggttgtgtgattaccgatgcttcgatcagcaattctgtattattcgaccacattaaaattgatgcattttcaaaagtggatcactgcgtggtgctaccacaagttaaaatcggtaaaaattgcgtgttgaaaaattgtattatcgaccgagaatgtgaaattcctgatggtatgcaaattggtgtagatatggaagaagataaaaaacgcttccgtattagctcaacaggtaaagtgattcttgtgacctcaaaaatgttaaagaaacttgagggacacgagattggcgaagaaggacatttagattag

SEQ ID NO: 2876 - protein, 433 aa, Haemophilus influenzae
MKSGDLNKYDLVKNTLVLVLAGGRGSRLHELTDKRAKPALYFGGNRRIIDFALSNCINSDLNRIGVVTQYAAHSLLRHLQTGWSFLPQERGEFIDMLPARQQIDDSTWYRGTADAVYQNMAIIKNHYRPKYILILAGDHIYKQDYSVMLMDHVNSGAKCTVGCIEVPRSEAHEFGVMAVNENLKVKAFVEKPKDPPAMVGKPDVSLASMGIYVFDADYLYKMLEQEVNTPQTSHDFGKDVLPKCLEEGALYAHPFSRSCMGRNTEGEIYWRDVGTLDSFWQSNIDLVSENPQLDIYDQSWPIRGNPIQAYPSKFFYKHSNVHPVDNSLIGGGCVITDASISNSVLFDHIKIDAFSKVDHCVVLPQVKIGKNCVLKNCIIDRECEIPDGMQIGVDMEEDKKRFRISSTGKVILVTSKMLKKLEGHEIGEEGHLD

SEQ ID NO: 2877 - DNA, 1431 bp, Haemophilus influenzae
atgaaaatcttacacgtttgctcggaactctatccgctcttaaaaacaggtgggcttgccgatgttttaggggcattaccccaagcacagaaccaaatcgggctagatgcccgcgttttattgcctgcttatccagcgatttctgcaggtatttctaatacacaaattgttgccgaatttgacaacttcgctgggcacgtggtgttgcgttatggagaatataatgatatcgggatctatttgattgacgcaccgcacttatacggtcgcgaaggcaatccttatcacgatgcctattacaacgactacggcgacaactacaaacgttttgccttgctcggttgggtgggggcagaattagccacaggtttagatagctggtggcgtgcagaagtggtacacgcccacgattggcacgcaggtttgtgtgcagcatatctgttcaacaaaggtcgccctgcgaaatcggtgttcactattcataacttggcgtatcaagggcagttttcttatcatcatttatacgaaattggtttgcctgcgggaatgtttaatgtggatggtttggagttattcggacaaatttcttatttaaaatcaggcttgttctattccgatgcaagcacggcagttagcccaacttatgtccaagaaatcacgacaccagaatttgcctacggtttgcaaggcttgctttctggcttaaaagctcaagatcgtttggtggggattttaaacggcgtggacgaaaatatttggcatccgaacgtggatcaatacatcccacaccattacaagctgaaatatatggcaggtaaaaagaaaaacaaagctgaactgcaagcctatttcaatttgccacaagatgaatctgctttggcatttgtgatggttacccgtttaaccgagcaaaaaggtgttgatttattaatcgaaagtgcagacgaaatcgtcaaacaaggcgggcagttgatgattttaggttcaggtgcaccgcacttggaacaaggtattcgtgagcttgctgaacgttatccacaaaatattgcggtaaaaatcggctatgatgaagccctttcgcatttaatggtggcaggtggtgatgtgattttagtgccaagccgtttcgagccttgtggcttaacccaactttatggtttgcaatatggcacactgccacttgttcgtaaaacaggtggtttggcagatacggtggtggatagcacttcagaaagcatcaaagctcgcaccgcaacaggttttgtgtttgaaagtgcaacgcctgaagctctccgccattgcttgcaacgtgcctttgccttatggcaaaaaccgcgtgcgtgggcgatggttcgcaccgatgcaatggaacaagacttcagctggcgtaaggctgcagagcaatatagaacactttatgaacgcttgtag

SEQ ID NO: 2878 - protein, 476 aa, Haemophilus influenzae
MKILHVCSELYPLLKTGGLADVLGALPQAQNQIGLDARVLLPAYPAISAGISNTQIVAEFDNFAGHVVLRYGEYNDIGIYLIDAPHLYGREGNPYHDAYYNDYGDNYKRFALLGWVGAELATGLDSWWRAEVVHAHDWHAGLCAAYLFNKGRPAKSVFTIHNLAYQGQFSYHHLYEIGLPAGMFNVDGLELFGQISYLKSGLFYSDASTAVSPTYVQEITTPEFAYGLQGLLSGLKAQDRLVGILNGVDENIWHPNVDQYIPHHYKLKYMAGKKKNKAELQAYFNLPQDESALAFVMVTRLTEQKGVDLLIESADEIVKQGGQLMILGSGAPHLEQGIRELAERYPQNIAVKIGYDEALSHLMVAGGDVILVPSRFEPCGLTQLYGLQYGTLPLVRKTGGLADTVVDSTSESIKARTATGFVFESATPEALRHCLQRAFALWQKPRAWAMVRTDAMEQDFSWRKAAEQYRTLYERL

SEQ ID NO: 2879 - DNA, 114 bp, Haemophilus influenzae
atgattaacgtagggtgtgtgaatttgcaaaattcacgcacgtttgcaaaaatcaatcaaaatttgaccgctctttgcgtgtatgaatattgttcacacagcctacaaaagtag

SEQ ID NO: 2880 - protein, 37 aa, Haemophilus influenzae
MINVGCVNLQNSRTFAKINQNLTALCVYEYCSHSLQK

SEQ ID NO: 2881 - DNA, 99 bp, Haemophilus influenzae
gtgcttgttttttgcaaagataagcataaaattcgaactacttttgtaggctgtgtgaacaatattcatacacgcaaagagcggtcaaattttgattga

SEQ ID NO: 2882 - protein, 32 aa, Haemophilus influenzae
MLVFCKDKHKIRTTFVGCVNNIHTRKERSNFD

SEQ ID NO: 2883 - DNA, 2466 bp, Haemophilus influenzae
atgataatggataactttgattctccattccaatataatcgtcctgaaatgaccgttgaagcgattaaaaaatcaatcgtttacaaacttattttcttaatcggtcgctctccacgtgaagccagccaacgcgattggctcaatgcaacactccacgctgtgcgtgatttagtaacagagggttggatcactactgcgcgtcaaactcgagcggaagattctcgccgtgtttactacctttcaatggaatttttaatcggacgtaccctttctaatgcgatgattgcagaaggcatttatggattagcacaagaagctctttctgaattaaatgtggatttagaagaggttttagaaaaagaaattgatcctggcttgggcaatggtggtttaggtcgtttagcggcgtgctttatggattctattgcgactcttggtttaccaggtatgggctacggtattcgttatgaatatggtatgttccgccaaaaaattgaaaacggtcagcaagtagaacgcccagatgcatggcttgaaaaaggggcaccttgggagtttattcgcccatctaaacgctttaccgtagaatttggtggaaacattcatttcgagggtaaaaaatgcatttggcaagataccgaaaaagtgaccgcacttgcttacgaccaaatgatcccgggttatcaaaacaattctgcagcaacattacgcttatggtcggcacacgcaggcgaagtgtttaaccttgccgacttcaaccgtggcgaacatttagccgcattagaagagcactccgcaaataaaaatttatcacgtgtactttaccctgatgattctacttggaatggtcgcgaattacgtttacgtcaagagtatttcttagtctctgcatcgcttcaagatattttacgccgtcacaaacgcgcccacaatagccttgaaaacttggcggataaagtggcgatccacttaaacgatacccacccagcgttagcaattcctgaattaatgcgaattttagtggatgatgaaggtttcgagtggaaaaaagcgtgggagatgacgcgtaacattttctcttacacctgccatactttaatgtccgaagcgttagaaacttggcctgtggaaatgatggcgaaaatcttaccgcgtcatttacagatgatttttgaaatcaatgatcatttcttagaatatgtccgcacttatgtgacaactgacaacgattttatccgccgtgtttctcttatcgaagaaggttaccaacgcaaagtgcgtatgggctggttgtctgttgtaggttcacacaaaatcaacggggttgccgaaatccattctgatttaatggtgacttcaacctttgcagattttgctcgtattttcccagaacgctttaccaacgtaacaaacggtatcacaccgcgtcgttggttagcggtggcgaacccacaattagccgcattgtttgataaatatatcggctcagaatggcgttgcgatttaagccaaatcgaaaaactcaaaccgttcacgcaagaaaaagcatttaaagaggctgttgctgacattaaatttgctaataaagtgaaattagcggaatacgtaaaacgcgaattaggggtagagcttgatccgcacgccttatttgacgtgcaagtaaaacgtattcacgaatacaaacgccaaatgttgaacgtattacatattatcgctcgctacaatgaaatgcttaccaaccctgaaaaagattggcaacctcgcgtatttattttagcaggtaaagcggcttcggcttattatgctgcgaaacaaaccattcacttaatcaatgatgtggcaaatgtaattaacaacgatgaacgcttgaaaggccgcttgaaagtggtgtttatcccgaactacagcgtaagccttgcacagttgattattcctgcagcagatatttctgagcaaatatcccttgccggcacagaggcttctggaactagtaatatgaaatttgcccttaacggtgcattgacactcggtacacttgacggtgcgaacgtagagatcttggaaaacgtgggagaagataatatctttattttcggcaacattgtggaacaagttgagcaacttcgtcgagaagggtatcgatcatttgaatactatcaaaacgatgttcaattacgcacagtcgtggatcaaattattgagggtaaattctcgccagaagaagctcaacgttatcatcaactattacaaggcttgcaatatcacgattattatcaagcttttgctgatttccgcagttatgtagaaactcaaaaagccgtagatgaaaaatacaaacaacgcgaccaatggattgaaagtactattcaaaatatcgtgaatatgggcttcttctcatctgaccgcacaattaaagagtatgcggagagaatttggaaagttgagcctgttcaattaggtgattaa

SEQ ID NO: 2884 - protein, 821 aa, Haemophilus influenzae
MIMDNFDSPFQYNRPEMTVEAIKKSIVYKLIFLIGRSPREASQRDWLNATLHAVRDLVTEGWITTARQTRAEDSRRVYYLSMEFLIGRTLSNAMIAEGIYGLAQEALSELNVDLEEVLEKEIDPGLGNGGLGRLAACFMDSIATLGLPGMGYGIRYEYGMFRQKIENGQQVERPDAWLEKGAPWEFIRPSKRFTVEFGGNIHFEGKKCIWQDTEKVTALAYDQMIPGYQNNSAATLRLWSAHAGEVFNLADFNRGEHLAALEEHSANKNLSRVLYPDDSTWNGRELRLRQEYFLVSASLQDILRRHKRAHNSLENLADKVAIHLNDTHPALAIPELMRILVDDEGFEWKKAWEMTRNIFSYTCHTLMSEALETWPVEMMAKILPRHLQMIFEINDHFLEYVRTYVTTDNDFIRRVSLIEEGYQRKVRMGWLSVVGSHKINGVAEIHSDLMVTSTFADFARIFPERFTNVTNGITPRRWLAVANPQLAALFDKYIGSEWRCDLSQIEKLKPFTQEKAFKEAVADIKFANKVKLAEYVKRELGVELDPHALFDVQVKRIHEYKRQMLNVLHIIARYNEMLTNPEKDWQPRVFILAGKAASAYYAAKQTIHLINDVANVINNDERLKGRLKVVFIPNYSVSLAQLIIPAADISEQISLAGTEASGTSNMKFALNGALTLGTLDGANVEILENVGEDNIFIFGNIVEQVEQLRREGYRSFEYYQNDVQLRTVVDQIIEGKFSPEEAQRYHQLLQGLQYHDYYQAFADFRSYVETQKAVDEKYKQRDQWIESTIQNIVNMGFFSSDRTIKEYAERIWKVEPVQLGD

SEQ ID NO: 2885 - DNA, 1539 bp, Haemophilus influenzae
atgttaattggtgtacctagagagctgcttgagaatgagagccgtgtggcgacaacgccgaaaacggttcagcaaatattgaaattgggctttgacgtgatcgtggaacacgatgcaggttttaaagctagttttgaagatcaagcatttttagaagcgggcgcgaagatcggtacgtcggctgaaatttggcaatcggatattatcttcaaagtaaatgcaccgacagatgaagaaatcgctcaaatgaaggaaggggcaactctcgtgagctttatttggcgcatgcaaaatcctgagttaatgaaaaaactcaccgcgaagaaaattaatgtgttagcaatggatgcggtgcctcgtatttctcgtgcgcaagcattggatgcgctttcttctatggcgaatatttctggttatcgtgcggtcattgaagctgcgcatgaattcggtagcttctttactgggcaaattactgctgcaggtaaagttccaccagcaaaagtgttggttattggtgcgggtgtggctggtttggcggcaattggtgcagcaaatagccttggggcgattgttcgtgcttttgactctcgtcctgaagtgaaagagcaagttcagagtatgggcgcgagcttcttagaaattgatttcaaagaagaaggtggcagtggcgatggttatgcgaaagtgatgtcggaagaatttaaccgtcgtgcgatggagctttacgcagaacaagctaaagaagtcgatattattattactacggcagccattccgggtaaaccagctcctcgtttaatcaccaaagaaatggtggattcaatgaaaccaggttcggtgattgtggatttagcggctgcaactggcggtaactgtgaatatacgcaagcagggaaagttgttacaactgaaaaccaagtgaaagtgattggttatacagatttcccaagccgtttaccaacgcaatcttctcaactttatggcacaaacttagtcaatttattaaaacttttgtgcaaagagaaagatggcaatattaatattgattttgaagatgtggttcttcgtggtgtaaccgttgttcgtgatggggaagaaattccaccagcacaaattcaagtgtctgcacaaccaaaacaagaaaccaaagctgcaccagtggcagagaaaaaagaatctaaaccaacagatcctcgtgtgaaatacggtgtgatggcaggtgttggcgtgttattcctttggttagcttctgtggcgcccgctgcatttttatcacatttcaccgtatttgttttagcttgtgtggtgggttattacgtggtttggaatgttagccatgcacttcacacaccattaatggcagtaacaaatgcaatttcaggcattattattgtaggtgcgttattacaaattcgtcagccaacaggcaatctatttatcgatgcgttagcttttgtggcgattttggtggcaagcatcaatatttttggtggtttccgtgtcacacaacgtatgttagcaatgtttagaaaaggttaa

SEQ ID NO: 2886 - protein, 512 aa, Haemophilus influenzae
MLIGVPRELLENESRVATTPKTVQQILKLGFDVIVEHDAGFKASFEDQAFLEAGAKIGTSAEIWQSDIIFKVNAPTDEEIAQMKEGATLVSFIWRMQNPELMKKLTAKKINVLAMDAVPRISRAQALDALSSMANISGYRAVIEAAHEFGSFFTGQITAAGKVPPAKVLVIGAGVAGLAAIGAANSLGAIVRAFDSRPEVKEQVQSMGASFLEIDFKEEGGSGDGYAKVMSEEFNRRAMELYAEQAKEVDIIITTAAIPGKPAPRLITKEMVDSMKPGSVIVDLAAATGGNCEYTQAGKVVTTENQVKVIGYTDFPSRLPTQSSQLYGTNLVNLLKLLCKEKDGNINIDFEDVVLRGVTVVRDGEEIPPAQIQVSAQPKQETKAAPVAEKKESKPTDPRVKYGVMAGVGVLFLWLASVAPAAFLSHFTVFVLACVVGYYVVWNVSHALHTPLMAVTNAISGIIIVGALLQIRQPTGNLFIDALAFVAILVASINIFGGFRVTQRMLAMFRKG

SEQ ID NO: 2887 - DNA, 1425 bp, Haemophilus influenzae
atgtctgaaggtttagtacaggctgcgtatattttagcagcattacttttcattatgagcttggcaggactttctaaacatgaaactgctaaagcgggttgttggttcggtattgttggtatgacaattgcccttatcgcaacaatttttggtcctcattctgaaggaacattttggatcattattgcgatgatcattggtggagtaatcggtgttcaacgtgcattaaaagtagaaatgactgaaatgccagaacttgtggcgattcttcacagtttcgtcggtttagcggctgtactcgttggctttaatagctatggtttacaccacgaggcgttaatgccagaaggattagatgcagcagcacaagccgcatttgtagctgaacaagcggtattaacgaatattcataatgtcgaagtctttttaggtatttttatcggtgcagtcactttcactggttctgttgtcgcatttggtaaattaagcggaaaaattaattcaaaagcattaatgttaccgcatcgccataaattaaatttagccgcacttgtggtatctgcattattgatggttgcattcttgaataatccagaaagcattttccctgtgttattaatgacagcaattgcgcttgcatttggatggcacttagtggcttcaatcggtggagcagatatgccagttgtagtatcaatgcttaactcatattctggttgggcagcggctgcagcaggttttatgttgaataatgatttgctgatcgttacaggcgcacttgttggttcttctggtgcaatcctttcttacattatgtgtaaagcgatgaaccgttcatttgtgagcgtaattgcaggtggttttggtaacgatgttcaagtttcttcaagcgaagaacaaggcgaacaccgtgaaactacagcggaagaagtggctgaattgttgaaaaatgcaagttctgtgattatcacgccgggatatggtatggctgttgcacaagcacaatatccagtcgctgatattacggcaaaattgcgtgaacgtggtgtgaacgttcgttttggtattcaccctgttgcaggacgtttaccgggccacatgaacgtgcttttagctgaagcgaaagtaccttacgatgtcgtacttgaaatggatgaaatcaatgatgatttcgctgataccgatgtggtattggttataggtgcgaacgatacggtaaacccagcggcgatggaagatccaaatagcccaatcgcgggaatgcctgtgttagaagtatggaaagcacaaaatgtgattgtgttcaaacgttcaatggcagtgggttacgctggcgtacaaaacccattattcttcaaagagaatacgcaaatgctctttggtgatgcaaaagatcgcgttgaagatatcttaaaagcattataa

SEQ ID NO: 2888 - protein, 474 aa, Haemophilus influenzae
MSEGLVQAAYILAALLFIMSLAGLSKHETAKAGCWFGIVGMTIALIATIFGPHSEGTFWIIIAMIIGGVIGVQRALKVEMTEMPELVAILHSFVGLAAVLVGFNSYGLHHEALMPEGLDAAAQAAFVAEQAVLTNIHNVEVFLGIFIGAVTFTGSVVAFGKLSGKINSKALMLPHRHKLNLAALVVSALLMVAFLNNPESIFPVLLMTAIALAFGWHLVASIGGADMPVVVSMLNSYSGWAAAAAGFMLNNDLLIVTGALVGSSGAILSYIMCKAMNRSFVSVIAGGFGNDVQVSSSEEQGEHRETTAEEVAELLKNASSVIITPGYGMAVAQAQYPVADITAKLRERGVNVRFGIHPVAGRLPGHMNVLLAEAKVPYDVVLEMDEINDDFADTDVVLVIGANDTVNPAAMEDPNSPIAGMPVLEVWKAQNVIVFKRSMAVGYAGVQNPLFFKENTQMLFGDAKDRVEDILKAL

SEQ ID NO: 2889 - DNA, 918 bp, Haemophilus influenzae
atggataaactcaacgcgatttctattttctgcaaagtcattgaaacccaaagttttacattggcagcaaagcaacaaaatatttctgtggcgatggcaagcaaattagtttcacaattagaagaacatttaaaaacacgattgttacaacgtaccaccagaaaaattatgcctaccgaagctggaatgatgtattatcaacgctgtcaaggcattttgcttgatttagatgaagcagattccagcattactcagcttaccagttcattacaaggaaatttactgatttccgttcctcgtgattttggtttactttttattgcaccaaatttacccacttttatggctaagcatcctcatttgcatattgaagttgaatttaatgataagaaaatcgatttattatccgaaggctatgatcttgctcttcgtattggttatatggaagatagctcgttggtttcacgtaaaataggaactactactgttcattttgcagcgtcgcctaattatcttgaaacgaatggtattccacaaacgcctgatgatttagaacatcacaatggcttactttataaaaatgcaatgaatcaggtaaattgggttggttcacgtataaatcaaacccaacgtttcaaaatccaatccaaagtagtaagtaatagcggttttgccttattaaatatggcaaaagcgggactaggtattgctaatttaccaaaatttattttaggtagagcctttgaaaaaggcgagcttattgaaatattgccagaatataaacaacaaaaattagaaattcatgtggtctatccaaacagaagacatttaccaataaaagtacgggcatttattgaatttttatctggcttaggcttgtgttcagaaattttggaaaatcctgaagatagtcgctaa

SEQ ID NO: 2890 - protein, 305 aa, Haemophilus influenzae
MDKLNAISIFCKVIETQSFTLAAKQQNISVAMASKLVSQLEEHLKTRLLQRTTRKIMPTEAGMMYYQRCQGILLDLDEADSSITQLTSSLQGNLLISVPRDFGLLFIAPNLPTFMAKHPHLHIEVEFNDKKIDLLSEGYDLALRIGYMEDSSLVSRKIGTTTVHFAASPNYLETNGIPQTPDDLEHHNGLLYKNAMNQVNWVGSRINQTQRFKIQSKVVSNSGFALLNMAKAGLGIANLPKFILGRAFEKGELIEILPEYKQQKLEIHVVYPNRRHLPIKVRAFIEFLSGLGLCSEILENPEDSR

SEQ ID NO: 2891 - DNA, 2607 bp, Haemophilus influenzae
atgagtaaatccttggtgattgtggagtcgccagcaaaagcaaaaactattaataagtatttaggtagccaatatgtcgtgaaatcgagcgtgggacatattcgtgatttgccgacggttggttctagtacaggtgaaaaagctaaaccaatttcaaccaaaggtatggatgccgaagaaaaggcaaaaattaaggcagaaaaggaacgtaacgccttagttaaacgtatggggattgatccttatcacgattggaaagcaaattatcagattctgcctggtaaagaaaaagtggtttccgaattaaagtcgcttgctaaaaaagcagatcacatttatctcgcaaccgacttggatagagaaggggaagcgattgcgtggcatttacgtgaagtgattggtggtaacgatgatcgttttagtcgcgtggtgtttaacgaaatcactaaaaatgccattaaacaggcttttgaaaagcctgaacaattaaatatggatcgtgttaatgctcaacaaactcgtcgttttttagatagagtagtgggctttatggtgtcgccattactttggaaaaaagtcgctcgcgggctttctgctggtcgagttcaatcggttgcggttaaattactagtagaacgcgagcgtgaaattaaagcgttccagcctgaagaatattgggaagttgccgtccttacgaataatcaaaataaacaagctatacgcttggatgttacggattataaaggcaagaaatttgatccaaaaaatcaaaaagaagcacaaagtgcggtagattttctgaatgtttcagattacgttgtcacagatttggaaactaagccaacaagttctcgccctcgagcaccatttattacatcaacacttcaacaaactgcaagtactcgcttgggatttggcgttaagaagacaatgatgttagcccaacgtttatatgaagcgggttacattacttatatgcgtacggattcaaccaatttgagtcaagatgcgcttaatatggcgcgtagctatattgaaaatcattttggtgcacaatatttaccagaaaaaccaaatttctattctagtaaagaaaatgcgcaagaggctcatgaggctattcgtccatcagatattcgagcattgcctgaatctttagagggaatggaaaaagatgcggtgcgcctttatgatttaatttggcgtcaattcttagcatgtcaaatgccgcctgcacaatatgatagcagtacattgactgtttcagctggcgattataccttgaaagcaaagggcagaattttacgttttgatggttggacaaaagtattgccacaaataggcaaaaatcctgaatatcaagaattgccttcagttactgtttcagaaaaacttgctttaaaagaagtgcaaccaactcaacactttactaaaccacctgctcgttttactgaagcggctttagtaaaagaattggaaaaacgtggtattggccgaccttccacttatgcggcaattatttccactattcaagaacgtggttatgttcgtactgaaaatcgccgtttctatgcagaaaagatgggcgaaattgtgactgatcgcctcaatgagtcttttggtgaattaatgaattacgatttcaccgcgaatatggaagatactttagataaaattgcctctggttcagtaaattggaaaactgaattgaatcaattctttaaggatttttctagccagctttctaaagctgaattagatgaacttgaaggtggtatgcgcccgaataatctcgtggaaaccgatattaaatgcccaacttgtgacagaaaaatggccattcgcacggcaagtacgggggtgtttttaggatgctcgggttatgcattgccgccaaaagagcggtgtaaaacgacgattaatttaattcctgaagcagaattattgaatgttttagatgaatcttcagaaactaaagcattaatggatcgtaaacgttgtacaaaatgtggaacggcaatggacagctatgtaattgatgcccatcgtaaaatccatatttgcggtaataatccaaattgtgatggatatttggttgaagaaggttcattcaaaattaaaggttatgatggccctgttgttgagtgtgataaatgtggtgcggatatgcatctaaaacttggtcgttttggcaagtatatgggatgtacaaattgtgataacacgcgcaaaattttgaaaaatggcgaggtcgcaccaccgaaagaagaaccagtacatttccctgagttaaaatgcgaaaaatctgatgcatattttgtattgcgtgatggtgcgagtggtgtatttatgtcagcccataacttccctaaatcacgcgaaacacgcccagttaaaatcgctgaactagtgcaatatcgcgagcgtttacctgaaaaattagcttatttagccgatgctccacaaaaagacccagaagagaatgaagcgattgttcgttttagtcgtaaagagaagaaacaatatgtgacttctgaaaaagagggaaaagcgactaaatggattgttgatttcaccaatggaaaatgggttgaacgaaagaaataa

SEQ ID NO: 2892 - protein, 868 aa, Haemophilus influenzae
MSKSLVIVESPAKAKTINKYLGSQYVVKSSVGHIRDLPTVGSSTGEKAKPISTKGMDAEEKAKIKAEKERNALVKRMGIDPYHDWKANYQILPGKEKVVSELKSLAKKADHIYLATDLDREGEAIAWHLREVIGGNDDRFSRVVFNEITKNAIKQAFEKPEQLNMDRVNAQQTRRFLDRVVGFMVSPLLWKKVARGLSAGRVQSVAVKLLVEREREIKAFQPEEYWEVAVLTNNQNKQAIRLDVTDYKGKKFDPKNQKEAQSAVDFLNVSDYVVTDLETKPTSSRPRAPFITSTLQQTASTRLGFGVKKTMMLAQRLYEAGYITYMRTDSTNLSQDALNMARSYIENHFGAQYLPEKPNFYSSKENAQEAHEAIRPSDIRALPESLEGMEKDAVRLYDLIWRQFLACQMPPAQYDSSTLTVSAGDYTLKAKGRILRFDGWTKVLPQIGKNPEYQELPSVTVSEKLALKEVQPTQHFTKPPARFTEAALVKELEKRGIGRPSTYAAIISTIQERGYVRTENRRFYAEKMGEIVTDRLNESFGELMNYDFTANMEDTLDKIASGSVNWKTELNQFFKDFSSQLSKAELDELEGGMRPNNLVETDIKCPTCDRKMAIRTASTGVFLGCSGYALPPKERCKTTINLIPEAELLNVLDESSETKALMDRKRCTKCGTAMDSYVIDAHRKIHICGNNPNCDGYLVEEGSFKIKGYDGPVVECDKCGADMHLKLGRFGKYMGCTNCDNTRKILKNGEVAPPKEEPVHFPELKCEKSDAYFVLRDGASGVFMSAHNFPKSRETRPVKIAELVQYRERLPEKLAYLADAPQKDPEENEAIVRFSRKEKKQYVTSEKEGKATKWIVDFTNGKWVERKK

SEQ ID NO: 2893 - DNA, 585 bp, Haemophilus influenzae
atgagcaacgtattagtattaaaatctagcatttcaggaaataactcgcaaactaatcaattagctgattatgttatcgaaaaattacaaggtaataacattgtagtacgcgatttatcccaacaacctcttccatattttgataccgcagctgcaattgctgtgcgtggagaaccaaaaacaacagaagaaaaacaacttctggcgttgtctgataaactaatcgaagaattaaaaaacgcacaaacattgataattggtgcgccgatgtataatttaaacgttccaacacaattaaaaagctattttgattttatcgcacgtccgcacgttactttccaatatacggcaaatggaccggaagggttattaaaaggcaaaaaagccattgtgttatgtgcatttggtggattgtatgatgaagaaaatctagtgacacaatatatgaaatcaattttaggttttatcggtatcacagatgtgcaatttgtttatgcacaaggcattggattcggatcagaagcaattgaaaaagcccaagcgtccgcaaaaaataaaattaatgaaattgtagcagccctttaa

SEQ ID NO: 2894 - protein, 194 aa, Haemophilus influenzae
MSNVLVLKSSISGNNSQTNQLADYVIEKLQGNNIVVRDLSQQPLPYFDTAAAIAVRGEPKTTEEKQLLALSDKLIEELKNAQTLIIGAPMYNLNVPTQLKSYFDFIARPHVTFQYTANGPEGLLKGKKAIVLCAFGGLYDEENLVTQYMKSILGFIGITDVQFVYAQGIGFGSEAIEKAQASAKNKINEIVAAL

SEQ ID NO: 2895 - DNA, 1932 bp, Haemophilus influenzae
atgccaattattactttacctgacggttcccaacgtcaattcgatcgtcctgtttctgttcttgaagtcgcacaagatattggtgcgggtcttgctaaagccactatcgcaggccgtgtaaacggagaacgtcgcgatgcgtgcgatgttatcgagcaagatgcaacgttagaaattattactgcaaaagatgaagacggtttagagattatccgccattcttgcgctcacttgctcggacacgctattaaacaattattcccagatgtaaaaatggcaattggtccaactattgaaaacggattctattatgatgtagatttagatcgctctttaacccaagaagatattgatgcaatcgaaaaacgtatgttggaattggcaaaaacaaattatgacgtcgtgaaaaaacgtgttacttggcaagaagcgcgtgatacctttgaaaaacgcggcgagccatacaaaatggcaattttagatgaaaacattgaacgtactgcaacgcctgcgttatatcatcacttagaatatattgatatgtgccgtggaccacatgtgccaaatatgcgtttctgtcagcatttcaaattacaaaaagtcgctggtgcgtactggcgtggcgacagtaaaaacaaaatgttacaacgtatctatggtacagcttgggcggataaaaaacaacttgctaaatatttaacacgcttagaagaagcggcaaaacgtgaccaccgtaaaattggtaaagcattagatttatatcatatgcaagaagaagcaccaggtatggtgttctggcacaatgatggctggacaattttccgtgagcttgaaaccttcgtgcgtactaaattaaaacaatacgattatcaagaagtaaaaggcccatttatgatggatcgcgtattgtgggaaaaaacaggtcactggcaaaattacgcagatttaatgttcacaactcaatctgaaaaccgtgaatacgcaattaaaccgatgaactgcccaggccacgttcaaatttttaatcaaggtttaaaatcttaccgtgatttaccaatccgtatggcggaatttggttcttgccatcgtaatgaaccatcaggttctttacacggtttaatgcgtgtgcgtggctttactcaagatgatgctcacattttctgtactgaagatcaaattgagagcgaagtaactagctgtatcaaaatggtgtacgacatttatagcacctttggcttcactaatatcgcagtaaaactttctactcgccctgaaaatcgtatcggttcagatgaaatgtgggatcgtgcggaagcaggtcttgctgcagccttagcacacaacggtcttgaatatgaaattcaagaaggtgaaggcgcattctatggtccaaaaattgagtttgcactacgagattgtttaggtcgtgaatggcaatgtggtaccgtgcaattagacttcgcattaccgggtcgtttagatgcaacttatgtggctgaagataatagccgtaaaacccctgttatgattcaccgtgcgattttaggttctattgagcgtttcattggtattattactgaagaatatgcaggtttcttccctgtatggttagcaccaacccaagcagttgtaataaatatcactgatagccaagctgactatgtacaaaaagtcgcaaaacaactttctgatgtaggtttacgcgtgaaaacggatttgcgtaacgaaaaagtgggcttcaaaattcgtgagcatactttacgccgtgtgccttatatgctcgtttgtggtgataaagaaatcgcagaaggcaaagtggcagtacgtacccgtaaaggtgctgatttaggcacatttactgtggaagaatttgcggaaatcttgaaaaatcaagtaagaagtcgtgaattaacgttattgaatgaagagtaa

SEQ ID NO: 2896 - protein, 643 aa, Haemophilus influenzae
MPIITLPDGSQRQFDRPVSVLEVAQDIGAGLAKATIAGRVNGERRDACDVIEQDATLEIITAKDEDGLEIIRHSCAHLLGHAIKQLFPDVKMAIGPTIENGFYYDVDLDRSLTQEDIDAIEKRMLELAKTNYDVVKKRVTWQEARDTFEKRGEPYKMAILDENIERTATPALYHHLEYIDMCRGPHVPNMRFCQHFKLQKVAGAYWRGDSKNKMLQRIYGTAWADKKQLAKYLTRLEEAAKRDHRKIGKALDLYHMQEEAPGMVFWHNDGWTIFRELETFVRTKLKQYDYQEVKGPFMMDRVLWEKTGHWQNYADLMFTTQSENREYAIKPMNCPGHVQIFNQGLKSYRDLPIRMAEFGSCHRNEPSGSLHGLMRVRGFTQDDAHIFCTEDQIESEVTSCIKMVYDIYSTFGFTNIAVKLSTRPENRIGSDEMWDRAEAGLAAALAHNGLEYEIQEGEGAFYGPKIEFALRDCLGREWQCGTVQLDFALPGRLDATYVAEDNSRKTPVMIHRAILGSIERFIGIITEEYAGFFPVWLAPTQAVVINITDSQADYVQKVAKQLSDVGLRVKTDLRNEKVGFKIREHTLRRVPYMLVCGDKEIAEGKVAVRTRKGADLGTFTVEEFAEILKNQVRSRELTLLNEE

SEQ ID NO: 2897 - DNA, 2781 bp, Haemophilus influenzae
atgaaaaaaacaaccgcactttttttacttatcttttcactaattgcttgtcaatcattggaactatcgcccaataataatttaccttttgatccaaatattcagcacggtaaactatcaaatggtctgcaatactttgtattaaaaaatactgaacccaaagaacgcgtttatattcgattagtgatcaatgcagggtcaatgcatgaagatgacgatcagaaaggcattgctcatttagttgaacatatggcatttaatggctcaaagaaatatccagaaaatcaaattattaatgcgttagaaaaacttggaatgaagtttgcacgagatattaatgcttttaccgattttgaaaatacagtctatactttaaatttagatagcaacaatcagcaaaaattagaattggcttttgatgtcatcaatgaatggatgaataatattacttttttgcctaaagatgtggatggcgaacgtggcgtagtacaagaagaatggcggagacgtttaagcccaatgttacgtattggcaataagaaaagtgctattgaaatggcgggttctcgttatgtgttgcgtgatcctattggagatatggatattattaaaacaatttcagctaaacgcgtcgctgatttttaccacaaatggtatcgaccagataatatgtcagtaattattgtaggcgatattgatacaaaacaagtagtaaaactattaaaacaaaacctatctcaagaaaacccaattactaaaacaacattggaaaaaattgattttaatattcctcttatcaacaaatggcgattagattctatttcagaacaaggcacaacaattcctagtattgaattaagtttttttgaaaatacaattgaaaccaatacattagcgagttataaacaagaattaattcagcaaattaccactcgattacttaacttacgtttacagcaatgggaaaagaaaacagaaaatggcgtagattctgcaaatttttatcgcactcatttaggtaaagaaacactacaaagcattttttctctccagcttatagatacacaatattcaaaaacgatagataaattatttgcctttattgccagtataaaacaacaaggttttactcaaaatgaattaaacggcgaaattaaacgcttaactcaactcaatgaaaaacaattaaatattcgttctggtagcttaaaaattgccgatgatctcattacttctgtggcaaataagcaagtggtattgagcgtaaatgatcgttatgaactcaataaacgttttttatctcaaattacattagctgatttacaacgcacgttaaatcaaaccttagcattaaaagcaaaattattattaatcactcaacctttgccacaaaaagccttgccttttgatgtagcagaaatagaaactcgttggaacaatgcaatggaaatgcaacaacaccaatgggatgaaaaaaaacaaatcgaaaaattaccgcacttaacatttaatacaggctcactttctcaagaaaaatattgggatcgcggcgatatttatgaatttcgtttaagtaatggaagtaaattgatctatcactatagtgacaaaactccaaatcaagtacattttcgtgctgttactcaaggtggtttacgttctatcccagataaggactatcacttattacgtgctgccgttagtgtagttgatgaaacaggtgttggagaactttctctttctgcggttaatcaaattttttcgcacgatccattggtgattgcaactgtgattgatgatgataaacaaggctttactggtgtatctaaacctaaggatttggaaaatttactgacattgttccgcttaaaattacgttcttctcctatatccgatcttgccttagaaaaatatcgacgtgaaacccgtgattatttcaaacagattgatttagaaacacaatttatgcaagccgtttcaaaactacgttttccaaatattgaaaccgtctatactcaaaaacaagcacagcaattagcatttgataaaaaccaattaagtaacgcttatcaacgttatattttagataaaacagattttacctattttattattggtgatattgaacttaatcaagtaaagaaattggcagaacgttatttagcttctattgaatcaaaaactcagatacgccatcttgtcccaactattattcatacaccaactcaatcatttatgatgaatggcttgaaagaaccgagagctgatgtagaaatataccttaccgcagataatacttggcgagcggaacaaaaatatttattcaatattcttgcggatattgtgcaagaaaaattacgcttaattctacgtgaaaaagtttctggtatttattctgtaaatagttggtttatgcaagatgtttatgcaccacaaattgaggggaaaattgaatttagttgcgaccctaagcgcgtagaggaacttacgcatcttacaaatcaggtactagatgacattataaaaaatggcattgatgaaaacttattacgtaaaaaactagcggaacaacatactcagattcgacgtgaatttgattctttagtttcaattgcttcaattattgaagaaagttactggcaacaagataatccagatgccatttatacctatcaacatttagatcagttagcgacaaaagccacaatagatgcgttggcgcaaaaagccctaaaaaaatcaggcagatttgtcagcatattaaaagcagctgcttattag

SEQ ID NO: 2898 - protein, 926 aa, Haemophilus influenzae
MKKTTALFLLIFSLIACQSLELSPNNNLPFDPNIQHGKLSNGLQYFVLKNTEPKERVYIRLVINAGSMHEDDDQKGIAHLVEHMAFNGSKKYPENQIINALEKLGMKFARDINAFTDFENTVYTLNLDSNNQQKLELAFDVINEWMNNITFLPKDVDGERGVVQEEWRRRLSPMLRIGNKKSAIEMAGSRYVLRDPIGDMDIIKTISAKRVADFYHKWYRPDNMSVIIVGDIDTKQVVKLLKQNLSQENPITKTTLEKIDFNIPLINKWRLDSISEQGTTIPSIELSFFENTIETNTLASYKQELIQQITTRLLNLRLQQWEKKTENGVDSANFYRTHLGKETLQSIFSLQLIDTQYSKTIDKLFAFIASIKQQGFTQNELNGEIKRLTQLNEKQLNIRSGSLKIADDLITSVANKQVVLSVNDRYELNKRFLSQITLADLQRTLNQTLALKAKLLLITQPLPQKALPFDVAEIETRWNNAMEMQQHQWDEKKQIEKLPHLTFNTGSLSQEKYWDRGDIYEFRLSNGSKLIYHYSDKTPNQVHFRAVTQGGLRSIPDKDYHLLRAAVSVVDETGVGELSLSAVNQIFSHDPLVIATVIDDDKQGFTGVSKPKDLENLLTLFRLKLRSSPISDLALEKYRRETRDYFKQIDLETQFMQAVSKLRFPNIETVYTQKQAQQLAFDKNQLSNAYQRYILDKTDFTYFIIGDIELNQVKKLAERYLASIESKTQIRHLVPTIIHTPTQSFMMNGLKEPRADVEIYLTADNTWRAEQKYLFNILADIVQEKLRLILREKVSGIYSVNSWFMQDVYAPQIEGKIEFSCDPKRVEELTHLTNQVLDDIIKNGIDENLLRKKLAEQHTQIRREFDSLVSIASIIEESYWQQDNPDAIYTYQHLDQLATKATIDALAQKALKKSGRFVSILKAAAY

SEQ ID NO: 2899 - DNA, 2403 bp, Haemophilus influenzae
atgtatcaaaaaaagccattaatgttgttattctgctcaacatttgtcagtccatttgttatggggaaaactattgaaacaaccaataaaaatatattgcccgaaatcgttgtttatggcgacaataataaatcgctttcttctgttaaaacgctttcttctgatgagataagtaaaacaccaacatcaaacggtaacatcactgattatcttcgttccaatccccatattcgttatgaaaatagcgaccaaaatggttttcaacgtggtgaaatcaagcctgaaaatatttcaattaacggtgccgatccaaatcaaaccgcctactttgttgataatgtcaatataaataatgatcttgctattgatagcagtatttttgacggtgctatgcaagttgtacctggaattagccacactcaagcttatttttttgatgcgactatgctttctaaagtggaagtacaagatagtaatatttctgctagcttagggggatttatgggaggggcagttatcgccaaaacaaaacaatatagcggcactgatagcataaaacttaaatatcgcacgacaaattcctcttgggcaaaaatggaagctggagactcagtacaaaaaatactgaagttggtacgtccagatgatgtcggagtggcagagttacaacctaaatacaataaacaaacattcaatattttggctgaaaaaaggctaaatgataatttaggaatggtttttggctatagccgtagaacatcatctattgaacaaaatcgtttaattggctttgataaagatgccaataataaaacacagttagacaaacaaaatcatcaacgactttccgataatcttttattaaatttcaattggacaccgcaagaaaaagaacgtattgaatttggtttacgttattcaaattataaggaattgaaatatttcaaggaaaatataaataacaacgtaagcgattatcatcaagcattgggatcaacgcttgcttgggtacattcattcaactctggcgtctggacaaataccttagcatacgatcgttttcaggataagcgtaaatcatcctcgaatagtgttgaaacaacatcggtgtcagatgaaaattgggatccactttataatttcgaaaaaggcggctatggtaatagccatttaacccaagataatttgcatttttcaactgaatatgtaatggatcctttttatttagcttctacggagcattctatttctattggtggaatttatcaggcaacaaaatatcaattctatcgtccacaagatgttcattcaaaagtggttcaagtgattttagatgcaaatagaaataatccaacaaaaatgatattgttggatagcacaacatcaaaaggtcgtgttaaaaccagttatcaaaatatcgctatttatgctgaagatttaataaaatggaataaatttgaattgcgtcctggtattcgtattgaacgtgatgattatttaaaaaacaataatattgccccgcgctttgttgcacgttaccgtccttgggataatacaggatttacactaggtttaaatcgttattacggtcgttcttttgcttcgctaaaattagcgaatggtattttaaagctcaataatgattcaacacgtcagcatcaaaatttttcatccctaaaaagcccttatgcagatgaattaagtttaagttttgatcaaaatatgggtaatttagcacttaaactcggttatattcatcgtgataataagaatcgtatcatattgaaacgagagtctacacggggtgaaagaaaaactagttatatcaatggacgtccgtttggtgttgatatttatactttccaactcaataatattgaaccttggaaattaggtaaaacttattggactacgtcacttggttttgattggctaaatacaaaacgagcagatgtaagtaatgaatttaatccaaatgaacccgtctatttagacggaaaattaatgactcgtagtcaaatgctacaacaagttaatagcagtacagaagattggattgctcgtttaggtattgatatgacgataccagattacaatatcacttggtctaataaagtgtatatgaaagccccaattcgtagctatgaggaacttgatggcgataacggtgatggcatttcacgcttccgtagctatcactatggcagacatacacaatgggatagtagcattcgttggcaaccaaccattctaggtaaacatagcgtttatatgcaagttgatattttaaatgtgctcaataaaacacgtaaaaataaagtcactactatttccaccagcgatgaatatggtgtttatacacctgggcgtgagttttggctagaagttggctatcaattctaa

SEQ ID NO: 2900 - protein, 800 aa, Haemophilus influenzae
MYQKKPLMLLFCSTFVSPFVMGKTIETTNKNILPEIVVYGDNNKSLSSVKTLSSDEISKTPTSNGNITDYLRSNPHIRYENSDQNGFQRGEIKPENISINGADPNQTAYFVDNVNINNDLAIDSSIFDGAMQVVPGISHTQAYFFDATMLSKVEVQDSNISASLGGFMGGAVIAKTKQYSGTDSIKLKYRTTNSSWAKMEAGDSVQKILKLVRPDDVGVAELQPKYNKQTFNILAEKRLNDNLGMVFGYSRRTSSIEQNRLIGFDKDANNKTQLDKQNHQRLSDNLLLNFNWTPQEKERIEFGLRYSNYKELKYFKENINNNVSDYHQALGSTLAWVHSFNSGVWTNTLAYDRFQDKRKSSSNSVETTSVSDENWDPLYNFEKGGYGNSHLTQDNLHFSTEYVMDPFYLASTEHSISIGGIYQATKYQFYRPQDVHSKVVQVILDANRNNPTKMILLDSTTSKGRVKTSYQNIAIYAEDLIKWNKFELRPGIRIERDDYLKNNNIAPRFVARYRPWDNTGFTLGLNRYYGRSFASLKLANGILKLNNDSTRQHQNFSSLKSPYADELSLSFDQNMGNLALKLGYIHRDNKNRIILKRESTRGERKTSYINGRPFGVDIYTFQLNNIEPWKLGKTYWTTSLGFDWLNTKRADVSNEFNPNEPVYLDGKLMTRSQMLQQVNSSTEDWIARLGIDMTIPDYNITWSNKVYMKAPIRSYEELDGDNGDGISRFRSYHYGRHTQWDSSIRWQPTILGKHSVYMQVDILNVLNKTRKNKVTTISTSDEYGVYTPGREFWLEVGYQF

SEQ ID NO: 2901 - DNA, 210 bp, Haemophilus influenzae
atgaaaattagtgctagaaaccaattaaaaggtaaagttctttcaatcgaaaacggttcagtaaatgcgatcgttcacatcgatatcggtggcggtaacgtgctttcttctactgtatctttagcagcagttaaagaattaaacttagaagttggtaaagaagcatacgcaatcatcaaagcaacttctgtaatggttggcgtagaataa

SEQ ID NO: 2902 - protein, 69 aa, Haemophilus influenzae
MKISARNQLKGKVLSIENGSVNAIVHIDIGGGNVLSSTVSLAAVKELNLEVGKEAYAIIKATSVMVGVE

SEQ ID NO: 2903 - DNA, 330 bp, Haemophilus influenzae
atgttgaataccaatggaattgaagttgaaattgacaaagatggttatttgctccatagccaacaatggaacgaagatgtcgctcgagctattgctcaggtagaaagtattgaattaactgatgcacattgggaagtgatttactttgtgcgagacttttatcaagaatataacacctcccctgccattcgtatgttggtaaaagccatggcggaaaagcttggtgcggataaaggtaatagccgttatttgcaacgcttatttcctgaaggccctgcaaaacaagccacaaaattagcaggcttgccgaaacctgcaaaatgcctataa

SEQ ID NO: 2904 - protein, 109 aa, Haemophilus influenzae
MLNTNGIEVEIDKDGYLLHSQQWNEDVARAIAQVESIELTDAHWEVIYFVRDFYQEYNTSPAIRMLVKAMAEKLGADKGNSRYLQRLFPEGPAKQATKLAGLPKPAKCL

SEQ ID NO: 2905 - DNA, 942 bp, Haemophilus influenzae
atgagcgaattaacccagttagcccagcaagaaaaaaaacaaagctataatttcaataaattacaaaaacgtcttcgccgtaacgtaggcaacgctatttcggattttgggatgattgaagatggcgataaagtcatggtgtgtttatccggaggcaaagacagttatacgcttctcgatattttgttgaatttacagcaaagtgcaccgattaaatttgatattgttgcggtgaacctcgatcaaaaacaaccagggtttccagaacacgtattgcctgaatatttggaaagtattggcgtagattacaaaattgtacaagaaaatacttacggcattgtgaaagaaaaaattccagaaggaaaaacaacttgttcactctgctctcgcctacgccgtggaattttataccgtactgccacagaacttggtgcaaccaaaatcgctttaggacatcaccgagacgatatgttagcgacgctatttttaaatatgttttatggcggcaaaataaaatcgatgccacctaaattaatttctgacgatggcaaacaaattgtgattcgtccgcttgcttactgcaaagaaaaagatgttgaaaaatatgccatcgcgaaaaaatttccgattattccttgtaacctatgtggctcacaaccaaatcttcaacgccaagtggtaaaagaaatgcttaatacttgggatcaccaatacccaggacgcttagaaaccatgttcagcgcaatgcaaaacattacattgtcacatatgtgtgatccgaaattatttaatttcaaaggaatcaaacatgggcaactaattgatggcattgaaggagataccgcatttgatgaagaacgaatcacgccaatgcaatttgaagacgaagatcaaaccgatttttcaaacaacgaaatgattaactttaaagaagtaaattaa

SEQ ID NO: 2906 - protein, 313 aa, Haemophilus influenzae
MSELTQLAQQEKKQSYNFNKLQKRLRRNVGNAISDFGMIEDGDKVMVCLSGGKDSYTLLDILLNLQQSAPIKFDIVAVNLDQKQPGFPEHVLPEYLESIGVDYKIVQENTYGIVKEKIPEGKTTCSLCSRLRRGILYRTATELGATKIALGHHRDDMLATLFLNMFYGGKIKSMPPKLISDDGKQIVIRPLAYCKEKDVEKYAIAKKFPIIPCNLCGSQPNLQRQVVKEMLNTWDHQYPGRLETMFSAMQNITLSHMCDPKLFNFKGIKHGQLIDGIEGDTAFDEERITPMQFEDEDQTDFSNNEMINFKEVN

SEQ ID NO: 2907 - DNA, 1428 bp, Haemophilus influenzae
gtgcggtcaattcaaaagaagatttttaagatccgcaaaaaatcctgtataatctttccaattttttgttcaattttaacgctttgcaattcaatgattgaaacatcccaaactattcctgaactcgtctcttgggcaaaagatcgcgagttttctttaaatttacctaccgaacgcttggtttacctgctagcgattgcaatttataacaacgaacgtttagacggcgaaatgttagaagccgatcttgtggatattttccgccacacgatgaatgcttttgagcaatccaccgatgccattgcaacacgagcgaataatgcaattaatgaattagtgaaacaacgtttgttaaatcgttttagtagtgaatttactgagggcttggcgatttatcgtttaacgccattaggtgttggcgtgtctgattattacattcgtcagcgtgaattttctgcattgcgtctttcagtgcaactttccattgtggcagatgaaattcaacgcgcttctgattctgcagaagaaggcgtggagaataatgaaggtgaacattattggcgtcgtaatgtgtttgtgccattaaaatattccgttgcagagatttttgatagcatcgatctttcacaacgtattatggatgaaaaccagcaaagtattaaagatgaaattgcagagcttcttactaaagattggcaagcggcgatttcaagctgtgaacgtttattagatgaaacatcagggaatttacgtgaattgcaagatacgctaaatgcagcaggggataaacttcaagcacaattattgcgtattcaagattgtgtgattgggcgtgatgatttgtattttatcgatcagttgattacggatttgcaatccaaactagaccgtattattagctggggacaacaagccattgatttatggattggttatgaccgccatgtacataaatttattcgtactgccattgatatggataaaaatcgcgtgttttcacaacgtttacgtaattctattcatcattattttgatcatccttggttcttatggaccgctcaagccgagcgtttagttgatctacgcgatgaagaaatggtgttgcgtgaagatgatgctttaggtgaattgccagaagaattgcaatacgaatccctttctgatttacatgatcaaattgtagagcatatgcaaggcttactgattgcttatcgtgaaaataaccgtccgattgatttgagtttagtgttaaaagaacaactggaaaattatccactttctcgtcattttgatgtggctcggatcattgttgatcaagccgtacgtcttggtatggcaaatgatgatttatcgggtatttatccagattggcaagcgattaatgaacgtggcgcagaagtgcaagcgcatgtgattgataagtattga

SEQ ID NO: 2908 - protein, 475 aa, Haemophilus influenzae
MRSIQKKIFKIRKKSCIIFPIFCSILTLCNSMIETSQTIPELVSWAKDREFSLNLPTERLVYLLAIAIYNNERLDGEMLEADLVDIFRHTMNAFEQSTDAIATRANNAINELVKQRLLNRFSSEFTEGLAIYRLTPLGVGVSDYYIRQREFSALRLSVQLSIVADEIQRASDSAEEGVENNEGEHYWRRNVFVPLKYSVAEIFDSIDLSQRIMDENQQSIKDEIAELLTKDWQAAISSCERLLDETSGNLRELQDTLNAAGDKLQAQLLRIQDCVIGRDDLYFIDQLITDLQSKLDRIISWGQQAIDLWIGYDRHVHKFIRTAIDMDKNRVFSQRLRNSIHHYFDHPWFLWTAQAERLVDLRDEEMVLREDDALGELPEELQYESLSDLHDQIVEHMQGLLIAYRENNRPIDLSLVLKEQLENYPLSRHFDVARIIVDQAVRLGMANDDLSGIYPDWQAINERGAEVQAHVIDKY

SEQ ID NO: 2909 - DNA, 732 bp, Haemophilus influenzae
atgacagatattcaagatgtaatttccccaaaactcgctgtggcgattgcaaatccaatatttccagcggtagatagtctattgcgctcaggtcgccatatcagcacggagcatttagataatcacgcatttttaatggatttccaaaatgaattggacggtttttatcgtcgctataacgtggaactaattcgtgcaccagaaggattcttctatcttcgcccgaaagcaacgacattaattgcgcgttcagtactttctgagttggaaatgcttgttggtaaagtgctttgttatctttatttaagcccagaacgtttagcccaacagggcatttttagcacgcaagaagtgtatgatgaattattaaatcttgctgatgaaggaaaattattaaaagcagttaatcagcgttcaagtggttctgacttagataaacaaaaattggcagaaaaagtacgggctgcaattggtcgtttacgtcgtttaggtatgattcaaaccgttggcgaacaaaatagtgggaaatttacgatttctgaatctgtatttcgttttggtgcagaagtgcgtagcggagatgatccattagaagcccaagctcgactcattcgtgatggggaagcggcaacaccagaatccttagcgttggaaaaacaagcgcaattaatggaaaacgatacgaaaagtgcggatgaaattgacgaagaatttgacggagaacaagaataa

SEQ ID NO: 2910 - protein, 243 aa, Haemophilus influenzae
MTDIQDVISPKLAVAIANPIFPAVDSLLRSGRHISTEHLDNHAFLMDFQNELDGFYRRYNVELIRAPEGFFYLRPKATTLIARSVLSELEMLVGKVLCYLYLSPERLAQQGIFSTQEVYDELLNLADEGKLLKAVNQRSSGSDLDKQKLAEKVRAAIGRLRRLGMIQTVGEQNSGKFTISESVFRFGAEVRSGDDPLEAQARLIRDGEAATPESLALEKQAQLMENDTKSADEIDEEFDGEQE

SEQ ID NO: 2911 - DNA, 4533 bp, Haemophilus influenzae
atgtctgatgtttttgaattagaaaatgaaatcgaattagaaagcgatgaagtcattctggaaaatgaaaacgtcgaagaaatcgttgaagcacctatgccttttagcatgacgacaaataacggtgtagagcgtggtaaattccgttctttaaccttaattaactggaatggtttttttgcccgtactttcgatttagacgaattagttaccacgctttctgggggtaacggtgcagggaaatcaaccacaatggctggatttgtgaccgcattaattcccgatttaacccttttacatttccgtaatacaacagaggctggttctacaggcggttctcgcgataaaggtttacatggtaaattgcgtccaggtgtttgttacgcagtattagataccattaattcacgtcatcaacgtattcttgttggtgtgcgtctgcaacaaatggcaggtcgtgataaaaaggttgatttaaaaacgttctcaattcaagctgtcgaattatctcaaaatccaaccgcacttttcactgaaatcgtggacgaacgtcaagcacgtgtacttaatttaaacgaacttaaagataaaattgaaaacattggtgcgcaatttaaacaatatcattccatcaccgattatcacggcatgatgttcgatttaggtattattccgaaacgtttacgttcagcatcagaccgaagcaaattctataaacttatcgaagcctctttatacggcggtatttccagtgcaatcacacgctctttacgtgattatttattgccagaaaatttaggtgtgcgtaaagctttccaagatatggaaagtgcattgcgtgagaaccgtatgactttagaggcgattaaggtcacgcaatcagatcgtgatttattcaaacatttaattactgaaaccaccaattatgttgcttcggattatatgcgtaatgcgaatgaacgccgtggcaatattgaggctgcattagaatctcgtcgtgagtggtataaagcaaaagcagagcagaatttatctcaacatcgtttagttgatttaagtcgagaagcggctgaattggcagaaaatgaacggactttagaagttgatcaccaaagtgcggttgatcatcttaatttagtgttaaatgctttacgtcaccaagaaaaaatcacgcgctatcaagaagatattgcagaacttaccgagcgtttagaagaacaaaaaatggtggttgaagatgcgaatgatgcgttagaagaaagccaagcccaatttgagcaaactgaaattgaaattgacgctgtacgagcccaattagctgactatcaacaagcattagatgcccaacaaactcgcgcacttcaatatcaacaagccattgctgctcttgaaaaagcgaaaacattatgcggtttagcggatttaagtgttaaaaatgtagaagattatcacgcagagtttgaagcccatgcagaaagtttaacggaaaccgtacttgagcttgagcacaaaatgtctatttctgaagcggcaaaatctcagttcgataaagcctatcaattagtatgcaaaattgcgggtgaaatgcctcgttctgcggcgtgggaaagtgcgaaagaattattacgtgaatatccaagccaaaaattgcaggcacaacaaacgccacaacttcgcacaaaattacatgaacttgagcaacgttatgcacaacaacaaagtgcggtcaaattacttaatgattttaatcaacgtgctaatttaagtttacaaacagcagaagaattagaggattatcacgctgagcaagaagcgttaattgaagatatttcagcaagattttcagaacaagtggaaaaccgttctacgcttcgtcaaaaacgtgaaaatttaaccgcactttatgatgaaaatgcgcgtaaagcaccagcatggctgacggctcaagctgcattggaacgtttagaacaacaaagtggcgagaggtttgaacatagccaagatgtgatgaattttatgcaatcacaacttgtgaaagaacgtgaactcacgatgcagcgtgatcaacttgaacaaaaacgtttgcaattagatgaacaaatttctcgtttaagtcagccagatggttcagaagatccacgcttaaatatgttggcagaacgctttggtggagtactgctttcagagctttacgatgatgtaaccattgaagatgcaccttatttctccgcactttatgggcctgtgcgtcatgctattgttgtgcgtgatctcaatgctgtgcgtgaacaacttgcgcaattagaagattgccccgatgatttgtatttaattgaaggcgatcctaccgcatttgacgacagcgtgttatccgcacaagaacttgagctaggtgttgtcgtgcaagtttcagatcgtgaattacgctattccagattccctgaaattccgttatttgggcgtgcagcacgtgaaaaacgtttagaagaattacaaattgaacgtgatgaagtggcagaacaatatgcccaaattgcgtttgatgtacaaaaatgccaacgtttacacgaacatttcagccaatttgttgggttacatttagcccttgcgttccagccaaatccagaagagttaatgtctgagattaatcgcgaacgcaatgaaattgatcgtgaattaaaccaatttaatagcggagaacaacaattacgcattcaattagataatgcaaaagaaaaactgcagttactcaacaagttaattccacaactcaatgtattagctgatgaagatttaattgatcgtattgaagaatgtcgtgagcaattagatattgcagagcaagatgaatattttattcgtcagtatggcgtaacgttgtcacaattagagccgattgcaaatagtttacaaagtgatccagaaaattacgaaggtttaaaaaatgaattaactcaagcgattgagcgtcaaaaacaagttcaacaacgtgtatttgcgttagctgatgttgtacaacgtaaacagcattttggttatgaagatgcagggcaggctgaaacttctgaactcaatgaaaaacttcgccaacgtttagaacaaatgcaggcacagcgagatacacaacgtgagcaagttcgtcaaaaacaaagtcaatttgccgaatataatcgcgtattgattcagttacaaagttcttacgatagtaaatatcaactcttaaatgaattgattggtgaaattagcgatcttggcgtgagagctgatgatggtgctgaagaacgcacgcgtatccgtcgtgatgaattacatcaacaactttcaacaagccgtcagcgtcgttcttatgtagaaaaacaactgacattaattgaaagcgaagcggacaacttaaatcgtctaatccgcaaaactgaacgtgattacaaaactcaacgtgaattagttgtagcagcgaaagtgagttggtgtgtggttttacgtttatcacgtaattctgatatggaaaaacgcctcaatcgccgagagctcgcttatttatctgcagatgaattacgttcaatgtcagataaagcattgggtgcgttacgtacagcggtagcggataatgaatatttacgtgatagtctaagagtgtctgaagatagtcgcaaacctgaaaataaagtgcggttctttattgcggtgtatcagcatctacgtgaacgcattcgtcaagacatcattaaaacggatgatccaattgatgccattgaacaaatggagattgaactttctcgtttaacggctgaattaactggccgtgagaaaaaattggcaatcagttctgaaagtgttgcaaatattatgcgtaaaacgattcagcgtgaacaaaatcgcattcgtatgctcaaccaaggtttacaaaacattgcgtttggtcaggtgaaatctgttcgtttggtagtgaatattcgtgatacccatgccatgttgttggatgcgctttctggtcagcaaaatgaatatcaagatttattcaacgacaaccgcatcaccttctctgaagctatggcgaagctctatcaacgcatcaatccacatattgatatggggcaacgcacagcgcaaacaattggtgaagaattgttagattaccgtaattatcttgagcttgaagtggaagtattccgtggtgctgatggttggttacgtgcagaaagtggcgcactttctacgggtgaagctattggtacaggtatgtcaattctcttaatggttgttcaaagttgggaagaagaaagccgtcgaattcgtggtaaagatattgtgccttgtcgcttgttgttcttagatgaagcagcacgtttagatggtaaatctatttctaccttattcgaactttgcgaacgtttagatatgcagttacttatcgctgcgccagaaaatattagcccggaaaaaggtacaacctataaactcgtgcgtaaaatcgcaggcaaccaagagcacgtacacgttgttggtttacgcggattcggtgcgacagaataa

SEQ ID NO: 2912 - protein, 1510 aa, Haemophilus influenzae
MSDVFELENEIELESDEVILENENVEEIVEAPMPFSMTTNNGVERGKFRSLTLINWNGFFARTFDLDELVTTLSGGNGAGKSTTMAGFVTALIPDLTLLHFRNTTEAGSTGGSRDKGLHGKLRPGVCYAVLDTINSRHQRILVGVRLQQMAGRDKKVDLKTFSIQAVELSQNPTALFTEIVDERQARVLNLNELKDKIENIGAQFKQYHSITDYHGMMFDLGIIPKRLRSASDRSKFYKLIEASLYGGISSAITRSLRDYLLPENLGVRKAFQDMESALRENRMTLEAIKVTQSDRDLFKHLITETTNYVASDYMRNANERRGNIEAALESRREWYKAKAEQNLSQHRLVDLSREAAELAENERTLEVDHQSAVDHLNLVLNALRHQEKITRYQEDIAELTERLEEQKMVVEDANDALEESQAQFEQTEIEIDAVRAQLADYQQALDAQQTRALQYQQAIAALEKAKTLCGLADLSVKNVEDYHAEFEAHAESLTETVLELEHKMSISEAAKSQFDKAYQLVCKIAGEMPRSAAWESAKELLREYPSQKLQAQQTPQLRTKLHELEQRYAQQQSAVKLLNDFNQRANLSLQTAEELEDYHAEQEALIEDISARFSEQVENRSTLRQKRENLTALYDENARKAPAWLTAQAALERLEQQSGERFEHSQDVMNFMQSQLVKERELTMQRDQLEQKRLQLDEQISRLSQPDGSEDPRLNMLAERFGGVLLSELYDDVTIEDAPYFSALYGPVRHAIVVRDLNAVREQLAQLEDCPDDLYLIEGDPTAFDDSVLSAQELELGVVVQVSDRELRYSRFPEIPLFGRAAREKRLEELQIERDEVAEQYAQIAFDVQKCQRLHEHFSQFVGLHLALAFQPNPEELMSEINRERNEIDRELNQFNSGEQQLRIQLDNAKEKLQLLNKLIPQLNVLADEDLIDRIEECREQLDIAEQDEYFIRQYGVTLSQLEPIANSLQSDPENYEGLKNELTQAIERQKQVQQRVFALADVVQRKQHFGYEDAGQAETSELNEKLRQRLEQMQAQRDTQREQVRQKQSQFAEYNRVLIQLQSSYDSKYQLLNELIGEISDLGVRADDGAEERTRIRRDELHQQLSTSRQRRSYVEKQLTLIESEADNLNRLIRKTERDYKTQRELVVAAKVSWCVVLRLSRNSDMEKRLNRRELAYLSADELRSMSDKALGALRTAVADNEYLRDSLRVSEDSRKPENKVRFFIAVYQHLRERIRQDIIKTDDPIDAIEQMEIELSRLTAELTGREKKLAISSESVANIMRKTIQREQNRIRMLNQGLQNIAFGQVKSVRLVVNIRDTHAMLLDALSGQQNEYQDLFNDNRITFSEAMAKLYQRINPHIDMGQRTAQTIGEELLDYRNYLELEVEVFRGADGWLRAESGALSTGEAIGTGMSILLMVVQSWEEESRRIRGKDIVPCRLLFLDEAARLDGKSISTLFELCERLDMQLLIAAPENISPEKGTTYKLVRKIAGNQEHVHVVGLRGFGATE

SEQ ID NO: 2913 - DNA, 909 bp, Haemophilus influenzae
atgaaaatctttacatcaaaaaaaggacaattatcacagctgaagcagcaaaaatttaagctggaaaaggatattcagcgtttatttgaagaaaatcttaccttattaagtggctatatttttattcgttcggaattttctattaaaaattcacgtattgataccttagcttttgatcctgaagctcaagcctttgtcattattgaatataaaagacaacaaaattctagtgtggttgatcaagggatttcttatcttaatttgatgcttgaatacaaagctgattttattgtggaatataatgaaaagcaaaaattcccacttaaaagaaatgatgtggattggtcacaatctaaggtgatttttgtttcacctgcttttaatgatttccaaattcaagccacgaattttaaagatttacctattgaattatgggaagttaatcgctttgataatgatattattacgctcaatattattaataaatcaaaatcagcaccgaatattaaagctgtttctaatgaaaagagagaagaattctcaatattaaaagaaataaaagtttatcaagaatctgatcacttaagtgataaatcagattttattcaagaactatacgaagattttaaacaaggcattttaaatttagatcctgatatcgaaattaataccagaaaactttacattgcatttaaaaaagatcgaaatattgcagatattcgtattcaacaaaagaatttaaaaatttggattaatcttccttatggagagttagacgatcctaaaaatttagccaaaaatgtatctaatactggtcactggggaaatggagattatgaaattgctgttgaaagtacccaatatcttgaatacgttatgagtttaattaaacaagccattaaggattaa

SEQ ID NO: 2914 - protein, 302 aa, Haemophilus influenzae
MKIFTSKKGQLSQLKQQKFKLEKDIQRLFEENLTLLSGYIFIRSEFSIKNSRIDTLAFDPEAQAFVIIEYKRQQNSSVVDQGISYLNLMLEYKADFIVEYNEKQKFPLKRNDVDWSQSKVIFVSPAFNDFQIQATNFKDLPIELWEVNRFDNDIITLNIINKSKSAPNIKAVSNEKREEFSILKEIKVYQESDHLSDKSDFIQELYEDFKQGILNLDPDIEINTRKLYIAFKKDRNIADIRIQQKNLKIWINLPYGELDDPKNLAKNVSNTGHWGNGDYEIAVESTQYLEYVMSLIKQAIKD

SEQ ID NO: 2915 - DNA, 876 bp, Haemophilus influenzae
atgcacaatcttatttttgccattctttgcagcgtagcagtttcagttttgcttaaaatagcccgtaaaaaaaatatcattattgaacaagctatcgcattcaactacattacagccatcactttcagttatttcttacttaaacctgattttaaaggtttagaatttactgattacattgcacaaagcgaaaattcacccatttttttagcactaggtttattgctacctagcgtatttattattatgtcaaaagcagtggagtttgctggaattatacgttcagatgcagcgcaacgtctttcgttatttcttcccattttagcagcgtttttaatttttcatgaaacactaagccaatctaaaatcattggcgttgtattagcctttattggtttgttttgtttattaactaagccaactcaagggcaaagtgcggtgaattttaaaggtgttttaggattaatcggcgtctggtttggttacggcatcattgatattttattcaaacaagtggcgaaaagcggcggcgcatttcctgcaacattatttatttccttctcgctggcagcttgcgttatgtttatctatttattcttaaaacgtgcgcaatggacatcatcaagtgtaattggcggcatcgttttaggtgtattgaatttctttaatattttattctatataaaagcccatcaaagttttgctggaaatccaacgcttgttttcgctggaatgaacattggcgtgatttgtttaggcacgataactggcgcattagtttttaaagaaaaaatcagtaagctaaattggattggtattatttttagtttatcagctattttctgcctatattatttagataaaattattgcgtaa

SEQ ID NO: 2916 - protein, 291 aa, Haemophilus influenzae
MHNLIFAILCSVAVSVLLKIARKKNIIIEQAIAFNYITAITFSYFLLKPDFKGLEFTDYIAQSENSPIFLALGLLLPSVFIIMSKAVEFAGIIRSDAAQRLSLFLPILAAFLIFHETLSQSKIIGVVLAFIGLFCLLTKPTQGQSAVNFKGVLGLIGVWFGYGIIDILFKQVAKSGGAFPATLFISFSLAACVMFIYLFLKRAQWTSSSVIGGIVLGVLNFFNILFYIKAHQSFAGNPTLVFAGMNIGVICLGTITGALVFKEKISKLNWIGIIFSLSAIFCLYYLDKIIA

SEQ ID NO: 2917 - DNA, 1422 bp, Haemophilus influenzae
atggcaaaagatttcagcttttttatttacgattatgaaagttttggtgtaaatccagcaacagatcgccctgcacaatttgcgggtattcgtacagatgctgattttaatatcattggcgaaccaataatgttttattgtaaacaaaccaacgattatttaccggctcctgaagccgtaatggtcacaggaattacgccgcaagaatgtaatgaaaaggggctttcagagcctgaattcgccgcaaatatcttagcagaattttcccaacccaatacttgtgtcatgggttataacaatattcgctatgatgatgaaatgacacgttatacgttttatcgtaatttcattgatccttatgaatacagctggaaaaacggaaattcacgctgggatttgttagatttagtacgagcctgttatgccttgcgtccagaagggattaattgggcttatgacgatgatggaatgccaagtttccgcttagaaaaactcactaaagcaaatggtattgagcatgaaaatgctcacgatgccatggaggatgtatatgcaactattgctatggcgaaattaattaaagaaaaacagcctaaattattccaatatttctttgaaaatcgcggtaaaaaagaaatcgaaaaattagttgatacaggcgcaatgacacctttagtgcatgtttctggaatgctagggaattatcgtggaaattgcacttgggttgcacctttagcttggcatccgacaaatcaaaacgcactcattgtttgtgatttaactggcgatatcgataatttattaaccaaaagtgcggatgaattacggacagatttatataccaaaaaatctgaattagaagaaagaggagtttcatctgttccgttaaagcttgtgcatatcaataaatgtcctattttagcaccagctaaaactttgttaccagaaacagcaaatcgattgggtattgatcgacaattatgcttggataatcttgcaaaattacgagcatcttttgatattcgtgaaaaagtggcggatatttttaatgaagaacgtcaatttgcatcaaatgataatgtagaaactgagttatacaatggcttttttagcaatgctgataaaaataatatggctattttacgtagtttacctgcagaaaaattatctgaacatggtttagcttttgaagataaacgtatccttgaattattgttccattatcgcgctcgtcatttttataaaaccctcacacgcgctgaacaaattaaatggaaaaaataccgacagaataaacttgaaaaaagtgcggtagagtttgaatcaagtttacaacgtttagctgaggaacattcagataattctgaaaaactatctttgctacaacaagtatatgaatatggtataaaattactaggttag

SEQ ID NO: 2918 - protein, 473 aa, Haemophilus influenzae
MAKDFSFFIYDYESFGVNPATDRPAQFAGIRTDADFNIIGEPIMFYCKQTNDYLPAPEAVMVTGITPQECNEKGLSEPEFAANILAEFSQPNTCVMGYNNIRYDDEMTRYTFYRNFIDPYEYSWKNGNSRWDLLDLVRACYALRPEGINWAYDDDGMPSFRLEKLTKANGIEHENAHDAMEDVYATIAMAKLIKEKQPKLFQYFFENRGKKEIEKLVDTGAMTPLVHVSGMLGNYRGNCTWVAPLAWHPTNQNALIVCDLTGDIDNLLTKSADELRTDLYTKKSELEERGVSSVPLKLVHINKCPILAPAKTLLPETANRLGIDRQLCLDNLAKLRASFDIREKVADIFNEERQFASNDNVETELYNGFFSNADKNNMAILRSLPAEKLSEHGLAFEDKRILELLFHYRARHFYKTLTRAEQIKWKKYRQNKLEKSAVEFESSLQRLAEEHSDNSEKLSLLQQVYEYGIKLLG

SEQ ID NO: 2919 - DNA, 1278 bp, Haemophilus influenzae
atgaaaaaaatattgaattttattgttgaaataaatttggcaatcattatttccttatttacttctgattttattctttggtttgcaataatacttttattaattttagcttggcatcatattaatgaatatcgtttactcaaatatctcaatttaaagcaagataataaattctctttattacaattaggaacattctctcaaactgaagcctaccatcgtcatcaaatttacaaagaaaaatgtgcaagtttacgtttgttatctcaaataaataaaaatattaagtatttaccagatgcaattattatctgtcagcataatggtaatatttcttggtgtaattcaattgcgcaacagatgtttgatttttgttggaataaaaaagtccagaaaaatatttttgatgttattttttatgaacaatttaaacattattttttcagtcaaaaaaaaagacgaccgttagtactattaacttataatcaacgttatattgaggtgcagtcgcacgcttataattctcatatgattttagttatcgctcgagatattacagatatgattcatttacttaattcacgccaaaaattcttgagtaatattaatcacgagctacgtactccattaaccgtattacaaggttacttagaaattcttgcagataataatattcagaaccctctacaaaaaaaggctatttttgcaatgcaagagcaaagccaacgaatggaacatctattacaacaatttaattttttagcaaaaatagaaacaacttcagataaggattttcgtacatttgatatgtcagctatgataaattctttaagaaaagatacagatatattaaatacttataatcatcacattgaatttattattcagcctaatatcattatttttggaaatgaatctcaactaagaagtgccgtttcaaatttaatttataatgctattaagcattctggtaaacagtgtcatattcaaattcaatgggaaacttgtgaacagggtattaaatttaacgtgatagataatggtgttggcatatcaccacagcatattccacatttaacagaacgtttttatagagttgatgaatctcgtagccatttaactggtggaagtggtttaggactagctattgtgaagcatactttattacaatatcattctcatttaaatattgaaagtactgaaacgaagggtagtagtttttcgtttatcatacctaaacgctttgtcatatcaaaaaataataaagaaattcaatga

SEQ ID NO: 2920 - protein, 425 aa, Haemophilus influenzae
MKKILNFIVEINLAIIISLFTSDFILWFAIILLLILAWHHINEYRLLKYLNLKQDNKFSLLQLGTFSQTEAYHRHQIYKEKCASLRLLSQINKNIKYLPDAIIICQHNGNISWCNSIAQQMFDFCWNKKVQKNIFDVIFYEQFKHYFFSQKKRRPLVLLTYNQRYIEVQSHAYNSHMILVIARDITDMIHLLNSRQKFLSNINHELRTPLTVLQGYLEILADNNIQNPLQKKAIFAMQEQSQRMEHLLQQFNFLAKIETTSDKDFRTFDMSAMINSLRKDTDILNTYNHHIEFIIQPNIIIFGNESQLRSAVSNLIYNAIKHSGKQCHIQIQWETCEQGIKFNVIDNGVGISPQHIPHLTERFYRVDESRSHLTGGSGLGLAIVKHTLLQYHSHLNIESTETKGSSFSFIIPKRFVISKNNKEIQ

SEQ ID NO: 2921 - DNA, 696 bp, Haemophilus influenzae
atgacgagaaaaattctgatagttgaagatgaatgtgcaatccgtgaaatgatcacactgtttttatctcaaaaatactatgatgtgattgaagcgagcgatttcaaaacagcgataaacaagataaaagaaaatcctaaactaatattattggattggatgctacctggtcgttcaggtatacaatttatacagtatattaaaaagcaagaaagctatgctgcgattcccattattatgctcacagctaaaagtacagaagaagattgtattgcctgtttaaatgcaggggctgatgactacatcactaaacccttttcacctcaaattttattagctcgcattgaggcagtatggaggagaatttatgaacaacaaagtcaatttatacaaatcgatgaactttccattgatgaaaatgctcagagagtgtttttccaacagcaggaaattaatttaagtagtacagaatttaaattgttacatttttttatgaggcaccctgaaaaagtttattctagagaacaattgttaaatcgtatttggcataatgatctagaagttgaatatcgcactgttgatagctatattcgccgtttacgccgtaatttagccccttttcaatgtgaacattacatccaaacagttcgaggatctggttatcgattttctagttatttacgagataaacaatga

SEQ ID NO: 2922 - protein, 231 aa, Haemophilus influenzae
MTRKILIVEDECAIREMITLFLSQKYYDVIEASDFKTAINKIKENPKLILLDWMLPGRSGIQFIQYIKKQESYAAIPIIMLTAKSTEEDCIACLNAGADDYITKPFSPQILLARIEAVWRRIYEQQSQFIQIDELSIDENAQRVFFQQQEINLSSTEFKLLHFFMRHPEKVYSREQLLNRIWHNDLEVEYRTVDSYIRRLRRNLAPFQCEHYIQTVRGSGYRFSSYLRDKQ

SEQ ID NO: 2923 - DNA, 768 bp, Haemophilus influenzae
atgattagtctacaagaaaccaaaatagctgtgcaaaatctaaatttctactatgaggattttcatgcattaaaaaacattaatttacgtatcgctaagaataaagtgaccgcctttattggtccttcaggttgcggtaaatctactttattgcggagttttaatcggatgtttgaactatatccaaatcaaaaagctactggtgaaattaatttagacggtgaaaatttactcacaacaaagatggatatttctctgattcgtgctaaggttggtatggttttccaaaaaccaacgccatttccaatgtcgatttatgataatattgcattcggtgttcgtttgtttgaaaaattatcaaaagaaaagatgaatgaacgagtagaatgggcattgactaaggccgctctttggaatgaagtgaaagataaattacataaaagcggagatagtttatctggcggacaacagcaacgcttgtgcattgctcgagggattgctattaaacctagtgtgttgttgttagatgaaccttgttcggcattagatcctatttcgactatgaaaattgaagaactcattacggagttaaaacaagattatactgtggttatagtaactcataatatgcaacaagctacacgttgctccgactatacggcatttatgtatttgggtgaattagttgaatttggtcaaacacaacaaatttttgatagacccaagatacaacgtacagaagattatattcgtggtaaaatggggtag

SEQ ID NO: 2924 - protein, 255 aa, Haemophilus influenzae
MISLQETKIAVQNLNFYYEDFHALKNINLRIAKNKVTAFIGPSGCGKSTLLRSFNRMFELYPNQKATGEINLDGENLLTTKMDISLIRAKVGMVFQKPTPFPMSIYDNIAFGVRLFEKLSKEKMNERVEWALTKAALWNEVKDKLHKSGDSLSGGQQQRLCIARGIAIKPSVLLLDEPCSALDPISTMKIEELITELKQDYTVVIVTHNMQQATRCSDYTAFMYLGELVEFGQTQQIFDRPKIQRTEDYIRGKMG

SEQ ID NO: 2925 - DNA, 849 bp, Haemophilus influenzae
atgaaaactaatcaaaacttgcgtttttattggcgtaaaacacacaataaattaatgttagggctttcctatatttcagtcattatcggcttattttggttgtgttggatattattcactctaattaccaaaggcattccagctttatcaattgatttattcacacaatctacccctgcccctaatgaaaaagggggattgttaaatgcactgattggttcgttttttattgtcggtgcgggtacattgataggcacgcctataggggtattggcaggaacgtatttggcagaatatggtcgttatagccgtttcgcacaaattacccgttttcttaatgatattcttctttctgccccttctattattattggtttgtttgtttacagcttatatgtatcaaaaatcgagcatttttcagggtgggctggagcattcgcattagctttattgcttattcctatcgtggtacgcactacggacaatatgttattacttgtaccaaataatttacgtgaagcagcggcagctcttggttgctctcaatggcaagttattatgatgatttgttatcgagcagctaaatcagggattttaactggcgtgctattagcagttgcccgaatttcaggagaaactgcaccgctattatttaccgctctgtctaatcaatttctatcttggaatatgaatgaacctatcgcaaatttacctgtagttatttatcaatatgcagcaagtccttttacagattggaataatctagcttgggcaggtgcagctctaataacattatttgtgctttgcttaaacattttcactcgactcttctttcaacataaaaaataa

SEQ ID NO: 2926 - protein, 282 aa, Haemophilus influenzae
MKTNQNLRFYWRKTHNKLMLGLSYISVIIGLFWLCWILFTLITKGIPALSIDLFTQSTPAPNEKGGLLNALIGSFFIVGAGTLIGTPIGVLAGTYLAEYGRYSRFAQITRFLNDILLSAPSIIIGLFVYSLYVSKIEHFSGWAGAFALALLLIPIVVRTTDNMLLLVPNNLREAAAALGCSQWQVIMMICYRAAKSGILTGVLLAVARISGETAPLLFTALSNQFLSWNMNEPIANLPVVIYQYAASPFTDWNNLAWAGAALITLFVLCLNIFTRLFFQHKK

SEQ ID NO: 2927 - DNA, 948 bp, Haemophilus influenzae
atgctcacaaaaagtcggaaatattttaatcaaacatggattgaatcattattcaaacagactacggcattgtttgctttgcttgtgtttattttacttgctgctattttaatttctttagtcataggaagctgggaaagtattaaacgttttggtgggagttttctattagaaacatattgggatcctgtacaagaacaatatggggcaattattcctattttaggtacgcttattacggcgggtatcgcattatttatcgcagtacccatttcatttggtattgctatttttttaacggagctagctcccaattggctaaaacgtcctataagcattgcaattgaaatgctagctgcaattccttctattatttacggaatgtgggggttgtttgtttttgttccattatttcaagaacatattcagccagtactaattgacaatttggggaatttacctggattagaattatttttttctggcgtaccttttggtgttggtttatttacggcaggattagtgcttgccataatgatcattccttttattgcatccgtaatgcgggatgtctttagtatagtaccaccaatgttaaaagaaggtgcttatggattaggtgcaaccacttgggaagtggttcgacaagtgattgtaccacacactagaatagggcttgttgggagtgtgatgctaggattgggaagagcattgggcgaaacaatggctatcacttttattataggtaattcgtttcaattgcctaattccttattttcaccttctacctcaatcgcatctgctattgctaacgaatttaatgaagcaggtggattacaaaaatctgcattgatggaattaggattacttctctttgttatcacaactatggtattgattttatcaagattaatgattacaaaaatgcaacaaacaaaagggaaataa

SEQ ID NO: 2928 - protein, 315 aa, Haemophilus influenzae
MLTKSRKYFNQTWIESLFKQTTALFALLVFILLAAILISLVIGSWESIKRFGGSFLLETYWDPVQEQYGAIIPILGTLITAGIALFIAVPISFGIAIFLTELAPNWLKRPISIAIEMLAAIPSIIYGMWGLFVFVPLFQEHIQPVLIDNLGNLPGLELFFSGVPFGVGLFTAGLVLAIMIIPFIASVMRDVFSIVPPMLKEGAYGLGATTWEVVRQVIVPHTRIGLVGSVMLGLGRALGETMAITFIIGNSFQLPNSLFSPSTSIASAIANEFNEAGGLQKSALMELGLLLFVITTMVLILSRLMITKMQQTKGK

SEQ ID NO: 2929 - DNA, 1020 bp, Haemophilus influenzae
atgtttatgcataaaatgaaaaaaaatcttattatcgttttaaccttaggtacgttaccttttgctcaagctaatagcatcactggtgctggagcgtctttcccttatccaatttatgcgaagtgggcatctttatatgagaaagaaactgggaataaagttaattatcaatccatcggttcgggcggcggacaacagcaaattattgcaaaaacggttgattttggtgcctctgacgatccaatgaaatccgaattattacaacaacaccaactagtccaattccctgcggttatcggtggtatagtgcctgttgttaatttgcctgaaattaaacctggtaaattaaagttatcaggtaagctgttagcagaaatcttccttggtaagattaaaaaatggaacgatcctgacttagttgcattaaatccaacgcttcctttaccaaataaaaacattattgtgattcatcgttcagacggctctggaacaacatttggcttcactaattatctatctaaagtttcgaacgattggaaaaatcaagttggtgaaggtaaatcagtgaagtggttaacaggtcaaggtggaaaggggaatgagggagttgcttcttatgttcgccaaatgaaatacagcattggttatgtagagtatgcctatgccaaacaaaatcagcttgcttggatttcattacaaaatcaagcagggcaatttgtacagccttctaatgaaagtttcatggcagctgcaagtcacgcaaaatggcacgaaaaggcgggaatgggtgttatattaaccaatgaaacgggggaaaaatcttggccaattacggcggcgagttttattttattaaataaatattctgacaatcctgaaacaactaaaaatgtattagccttttttgattgggcattctcaagagggcaagatgcggcaactgaattagattatgtgccaattccagctgatgtggtgtctaccattaaaagtcaatggaaaacagagctaaaacaataa

SEQ ID NO: 2930 - protein, 339 aa, Haemophilus influenzae
MFMHKMKKNLIIVLTLGTLPFAQANSITGAGASFPYPIYAKWASLYEKETGNKVNYQSIGSGGGQQQIIAKTVDFGASDDPMKSELLQQHQLVQFPAVIGGIVPVVNLPEIKPGKLKLSGKLLAEIFLGKIKKWNDPDLVALNPTLPLPNKNIIVIHRSDGSGTTFGFTNYLSKVSNDWKNQVGEGKSVKWLTGQGGKGNEGVASYVRQMKYSIGYVEYAYAKQNQLAWISLQNQAGQFVQPSNESFMAAASHAKWHEKAGMGVILTNETGEKSWPITAASFILLNKYSDNPETTKNVLAFFDWAFSRGQDAATELDYVPIPADVVSTIKSQWKTELKQ

SEQ ID NO: 2931 - DNA, 489 bp, Haemophilus influenzae
atgcttaatcaaataatcataaacaagctgaacgaccaaattaacttagagttctactcttctaatgtttatttacaaatgagtgcatggtgttcaaaacacggttatgagggggctgctaccttcttacttcgtcatgctgatgaagaattagaacatatgcaaaaactgtttaattatgtaagtgaaactagtggtatgcctattttaggaaaaattgatgcacctaaacatgattattcttcattaagagaagtttttgaaataactttagaacatgaaaaattagtcacgtcaaaaatcaatgaattagttgaagttacttttgaaagcaaagactactctacttttaacttcctgcagtggtatgtagcagaacagcatgaagaagaaaaattatttagtggaattattgatagatttaatcttgttggcgaagatggtaaaggattattctttattgatcgtgaactcgcaactttggaatag

SEQ ID NO: 2932 - protein, 162 aa, Haemophilus influenzae
MLNQIIINKLNDQINLEFYSSNVYLQMSAWCSKHGYEGAATFLLRHADEELEHMQKLFNYVSETSGMPILGKIDAPKHDYSSLREVFEITLEHEKLVTSKINELVEVTFESKDYSTFNFLQWYVAEQHEEEKLFSGIIDRFNLVGEDGKGLFFIDRELATLE

SEQ ID NO: 2933 - DNA, 498 bp, Haemophilus influenzae
atgttatcagaaaatgtagtaaaactattaaacgatcaaatgaatttagagttttattcttctaatttatatttacaaatgagtgcttggtgcgatcagcaaggctttgaaggcactgcaaaattcttatcagttcatgctgctgaagaaatgcaacatatgcgtaaattatttacttatttaaatgaaactggctcacttgctgtaatttctgcaattgaagcacctgcacatgaatataaatcattaaaagaaataattgaaactacctatgagcatgaaaaattaattaccagtaaaatcaatgaattagtaggtaaaacctttgaagaaaaagactactctgcatttaatttcttacaatggtatgtggaagaacaacatgaagaagaaaaattatttagtagtattttagataaattaaattttcttggagaagatggcaaaggcttgttcctaattgataaggatttaggtaatctctctactaaagcctaa

SEQ ID NO: 2934 - protein, 165 aa, Haemophilus influenzae
MLSENVVKLLNDQMNLEFYSSNLYLQMSAWCDQQGFEGTAKFLSVHAAEEMQHMRKLFTYLNETGSLAVISAIEAPAHEYKSLKEIIETTYEHEKLITSKINELVGKTFEEKDYSAFNFLQWYVEEQHEEEKLFSSILDKLNFLGEDGKGLFLIDKDLGNLSTKA

SEQ ID NO: 2935 - DNA, 261 bp, Haemophilus influenzae
atgaaaaggatctatactgatgaaccgaccaaccaaccaaccaaccaaccaaccaaccaaccaaccaaccaaaataataaaaccgttgcggtagtgacttcaacaattggtcgtccagaattatctttggctattaaaagcgtacaaaatcaaacttatccatgtaagcattatgtatttgttgatggcaatattttctgggataaagccaaatctatatttatagaatattatggaggttgcccttgggcaaaggaataa

SEQ ID NO: 2936 - protein, 86 aa, Haemophilus influenzae
MKRIYTDEPTNQPTNQPTNQPTNQNNKTVAVVTSTIGRPELSLAIKSVQNQTYPCKHYVFVDGNIFWDKAKSIFIEYYGGCPWAKE

SEQ ID NO: 2937 - DNA, 1557 bp, Haemophilus influenzae
atgaacattcaaactcaagcctttattgcggtgacagctcaacccattccctattatgctgacaccaccgctatttttaatacactttgccaacctaattcaaattctcttctactcgattctgccgaaatcggaagtaaaaatagtttacaaagtcttattttagttaatgctgcagttaagataacttgtttaggtcacaacgtcacatttaaagctttaaataagaatggaaaacaagttttaaaagaaattcatccaaaattaaccgcacttggaaaaataagtgcggtcaattttgaagacgaattttctgtacaattttcaccacttgataatcaactcgatgaagatagtaaattacagtctgccactatttttgatggactgcgtgttatttctagtctttatcaacatagccaaacgcctattttcttaggcggattatttgcttacgatctcgtcgcaaattttattccaatggatggtattacattgcaaaatgatggtatcaactgccctgattacagtttctatcttgccgaacacctcattactatcgatcatcaaaatcaacaagcgacactcaaaagtttctgttttgctcaagaagaacaagttaatattgcgaaaacctccctttctatcgcacaaaaactaaaaaatattgatcacgttctttctattaaagcggcaagtgatgaagttaaaacaaactttgacgatcctgaatttactggtatcgtaaaagccttaaaacaccatattaacattggagatgttttccaaattgtgccttctcgccgtttttcccttgcttgcccgaatacattagccagttatgctcaactcaaacaaaataatccaagcccttatatgttctatatgaacgatgaagactttattttgtttggtgcatcgccagaaagtgcgctgaaatatgcgccagaaaatcgtcagctagaaatttacccaatcgcaggttcacgccctcgtggttttgatgctcacggcaatatcgatcctgaattggatgcgcgtttagaactagaacttcgccttgatcacaaagaacaagcggaacatttaatgttggttgatttagcacgtaacgacattgctcgagtttgccaaagcggtacccgtaaagtggctgagttaatgcaggtggatcgctattctcacatcatgcatttggtctctcgcgtagtgggtaaattacgccctgagttagatgcacttcacgcctatcaagcctgtatgaatatgggcacattaactggtgcgccaaaaatcaaagcaatgcaacttatttatcaatttgagcagcaaaaacgccatagttacggtggtgcggtgggttatctcacttccgatggacattttgatacctgtatcgtaattcgttctgcttttgtacaaaatggaatagcccatgtacaagcaggttgcggtgaagtgttggattctgatccacagatggaagctgacgaaacacgccacaaagctgcggctgtcttaaaagcaattcgtcaagttaatacacaagcaaaataa

SEQ ID NO: 2938 - protein, 518 aa, Haemophilus influenzae
MNIQTQAFIAVTAQPIPYYADTTAIFNTLCQPNSNSLLLDSAEIGSKNSLQSLILVNAAVKITCLGHNVTFKALNKNGKQVLKEIHPKLTALGKISAVNFEDEFSVQFSPLDNQLDEDSKLQSATIFDGLRVISSLYQHSQTPIFLGGLFAYDLVANFIPMDGITLQNDGINCPDYSFYLAEHLITIDHQNQQATLKSFCFAQEEQVNIAKTSLSIAQKLKNIDHVLSIKAASDEVKTNFDDPEFTGIVKALKHHINIGDVFQIVPSRRFSLACPNTLASYAQLKQNNPSPYMFYMNDEDFILFGASPESALKYAPENRQLEIYPIAGSRPRGFDAHGNIDPELDARLELELRLDHKEQAEHLMLVDLARNDIARVCQSGTRKVAELMQVDRYSHIMHLVSRVVGKLRPELDALHAYQACMNMGTLTGAPKIKAMQLIYQFEQQKRHSYGGAVGYLTSDGHFDTCIVIRSAFVQNGIAHVQAGCGEVLDSDPQMEADETRHKAAAVLKAIRQVNTQAK

SEQ ID NO: 2939 - DNA, 582 bp, Haemophilus influenzae
atggctaatattttatttttagataacttcgattcctttacttacaatcttgtggatcaattccgtgttttgtgtcacaacgtcacaatttatcgcaatgactgcgacttagaaaaactggtagaaaccgcactcaatacacctgataccattcttgcactttctccagggccaggaacgccatcagaagctgggattttactgccattgatcgaacgcttaaaaaataaagtgccgattattggaatttgtttaggtcatcaagcgttgattcaagcctttggtggtaaggttgttcacgctggcgaagtgttgcatggtaaagtttctcgtatatcccatgataacgaagcgatgtttaaagatcttgctaatccaatgcctgtggcgcgttatcattctttaatgggacaagatttaccaaaagaatttatcgtcaatgcggaatataatggcattattatggcaattcgtcatcgtgatttacccatttgcgcattccaatttcaccctgaaagtattttaactgtgcaaggttcgcaattattacaacaatcaattgaatggttgttaaatagataa

SEQ ID NO: 2940 - protein, 193 aa, Haemophilus influenzae
MANILFLDNFDSFTYNLVDQFRVLCHNVTIYRNDCDLEKLVETALNTPDTILALSPGPGTPSEAGILLPLIERLKNKVPIIGICLGHQALIQAFGGKVVHAGEVLHGKVSRISHDNEAMFKDLANPMPVARYHSLMGQDLPKEFIVNAEYNGIIMAIRHRDLPICAFQFHPESILTVQGSQLLQQSIEWLLNR

SEQ ID NO: 2941 - DNA, 387 bp, Haemophilus influenzae
atgatcactgtattcggacttaaatccaaactcgcaccacgtcgtgaaaaactcgcggaagtaatttataacagtcttcatctcggattagacattccaaaaggcaagcatgcgattcgctttttgtgtttagaaaaagaagatttttactacccttttgatcgtagcgatgattacaccgtcatcgaaattaacctgatggctggccgtatggaaggcacaaaaaaacgcttgataaaaatgctatttagcgaattagagtacaaactcggcattcgagctcacgatgtggaaattacgattaaagaacaaccggcacattgctggggtttccgaggaatgacaggtgatgaggcacgcgatttagattacgatatttatgtttaa

SEQ ID NO: 2942 - protein, 128 aa, Haemophilus influenzae
MITVFGLKSKLAPRREKLAEVIYNSLHLGLDIPKGKHAIRFLCLEKEDFYYPFDRSDDYTVIEINLMAGRMEGTKKRLIKMLFSELEYKLGIRAHDVEITIKEQPAHCWGFRGMTGDEARDLDYDIYV

SEQ ID NO: 2943 - DNA, 1002 bp, Haemophilus influenzae
atgcaacacaacccattattagaacaactttatagcgggcattcactttcaacctcagaaagcaccgctctttttaatgcagtcatccaaggtgagctttccaatgaacaaattgctgcaatgcttattgctttaaaagtgcgggaagcaaatactgaggaaatttcgggtgccgttgccgcctcattacaaaatgccaaagcatttccatatccaaattatccttttgcggatattgtaggaacaggaggcaatggtcaaaacactattaatatttccactaccagtgcgattgttgcggcatcaatgggagcaaaaatagcaaaacatggcaatcgtagcgtgtcgagtaaatcaggtgctagcgatgtgcttaccgcacttggcgttaatgtgaacgtcacaccagagcaagctcgacaagcgttagatgaaattggtgtctgttttttatttgctcaacaatatcattctggcttccgccatgttgcgccagtccgtgccgctttaaaaacgcgcactatctttaatattttagggccgcttatcaatcctgctcgcccaacttatcatttacttggcgtatatgcgcctgaattagtaaaaacctatgctgaaaccgcagttgccttagaacatcaacattcctttgttgtacatggttctggcttagatgaagtcgcattgcacggcgaaacacaagtggcagaaattaaaaatggcaaaattgaatatttcactttaacgcctgaagattttggcttaaaaacgcaatccctcgaaagtcttcgcggtggtgaaccacaagaaaatgcccaatatctaaccgcacttttacaaggcaaaggaaaggctgaacatgctaatgcggtggctgcaaatacggcattattattgaaattattcggttacgatgatttaaaacaaaatgtgcaaaatgtactggcgcatcttgtatcaggtaaagcctttgaaacattacagaaattaaccacatattaa

SEQ ID NO: 2944 - protein, 333 aa, Haemophilus influenzae
MQHNPLLEQLYSGHSLSTSESTALFNAVIQGELSNEQIAAMLIALKVREANTEEISGAVAASLQNAKAFPYPNYPFADIVGTGGNGQNTINISTTSAIVAASMGAKIAKHGNRSVSSKSGASDVLTALGVNVNVTPEQARQALDEIGVCFLFAQQYHSGFRHVAPVRAALKTRTIFNILGPLINPARPTYHLLGVYAPELVKTYAETAVALEHQHSFVVHGSGLDEVALHGETQVAEIKNGKIEYFTLTPEDFGLKTQSLESLRGGEPQENAQYLTALLQGKGKAEHANAVAANTALLLKLFGYDDLKQNVQNVLAHLVSGKAFETLQKLTTY

SEQ ID NO: 2945 - DNA, 1431 bp, Haemophilus influenzae
atgattactcaagattttactaaacccattgattccgctacggtgctacaaaaaatcgtgcttgacaaagcgcaatgggttaaagcaaaagaaaaggaatttcccctttcacaatttaaacaaaacattcaaaactctgaccgctctttttatgatgcgttagcaaaaggcacgcatcaaaagcccgcttacattttggaatgtaaaaaagcctccccttctaagggattaattcgtgctgaatttaatttggaagaaatcgccaatgtctataaacattatgcctctgctgtatctgtgctaactgacgaaaaatactttcaagggaattttgaattcttgcctttagttcgcgatatcgtaagccaacctgtgctttgcaaagattttatgattagcgaatatcaagtttaccttgctcgctactatcaagcgcatgcaattttattaatgctttctgtggtaaacgatgagacttatcgtgtgctggcagagcttgcgcattctcttggtatgggcgtattgacagaaaccagtaatgaagaagaatttgaacgtgcccttgcgcttggtgcgaaaatcattggtgttaataatcgtaacttgcacgatttaactgtggatttaaatcgtgttgttgaactcactgaaaaatacgccgactgtattcctgctgatgtacgtattattagcgaatcaggcatttacaatcacaagcaaattcatcaattacaaaaggtggcgcatggtttcttaattgggagtagtttaatgggcaatcaagatttgaataatgcggttcgctcggtaatttttggagaaaataaagcatgcggtttaacgcgcgcgcaagatgtcaaaatcgtttacgaaaacggcgcactctacggcggattaatcttcgcagaacattcaaaacgctgtgtgagtttacgccaagcgcaagaattagtaaccgctgcgccacttcgatttgttggtgtttttcagaatcaagaaattgactttatcgtcaaaatagccaaccaattacagctttatgcggtgcaattacatggtgcagaaactgaagcatttattaccgcacttcgccagcaactaccaaaaaacacgcaaatctggaaagcgatttcggtcaatactgaaacccaaagtgcggttgattttactgatgatttaaatgtggatcgttatatttttgatagtcaaatcgcgaaccagcaaggtggcacgggtaaaacctttgattggtcattaattcctgaaaatcttaaacacaagattattttagctggaggcatctcaccaaataatgtggaacaagccattcaacaaaattgcttaggcttggatcttaattctggggtggaaagttctgcgggcgtaaaagatcaagaaaaagtgcggttagtttttaataatatttattaa

SEQ ID NO: 2946 - protein, 476 aa, Haemophilus influenzae
MITQDFTKPIDSATVLQKIVLDKAQWVKAKEKEFPLSQFKQNIQNSDRSFYDALAKGTHQKPAYILECKKASPSKGLIRAEFNLEEIANVYKHYASAVSVLTDEKYFQGNFEFLPLVRDIVSQPVLCKDFMISEYQVYLARYYQAHAILLMLSVVNDETYRVLAELAHSLGMGVLTETSNEEEFERALALGAKIIGVNNRNLHDLTVDLNRVVELTEKYADCIPADVRIISESGIYNHKQIHQLQKVAHGFLIGSSLMGNQDLNNAVRSVIFGENKACGLTRAQDVKIVYENGALYGGLIFAEHSKRCVSLRQAQELVTAAPLRFVGVFQNQEIDFIVKIANQLQLYAVQLHGAETEAFITALRQQLPKNTQIWKAISVNTETQSAVDFTDDLNVDRYIFDSQIANQQGGTGKTFDWSLIPENLKHKIILAGGISPNNVEQAIQQNCLGLDLNSGVESSAGVKDQEKVRLVFNNIY

SEQ ID NO: 2947 - DNA, 273 bp, Haemophilus influenzae
gtgtttaggcgttccgatcaaattgtcaaaattgatgaaaattctcttcaacttgccacagtagatgtatgtggcgtacaacgtgaagtaaatatttcactagtctgcacgggaaatccagccgatttacttggcaaatgggtgcttgttcatgtgggctttgcaatgactgttattgatgaagatgcagctaagaaaacccaagaggctctgatcacaatgagccaacttgaacatgaagttggagattttttaggactaaatcaaaaataa

SEQ ID NO: 2948 - protein, 90 aa, Haemophilus influenzae
MFRRSDQIVKIDENSLQLATVDVCGVQREVNISLVCTGNPADLLGKWVLVHVGFAMTVIDEDAAKKTQEALITMSQLEHEVGDFLGLNQK

SEQ ID NO: 2949 - DNA, 2865 bp, Haemophilus influenzae
atgacacaaaaattcgaaatggtagaccgttttaatccgtctgcggtagagcaagccctttatcaacattgggaagagagcggttattttaaaccgactgaaaatgaacatgcgccgagctattgcattgcgattccgccgccgaacgtaacaggttctctacacatggggcatgctttccaacaaaccttaatggataccttagtccgttttaatcgtatggaagggcataacaccttatggcaagcggggacagaccacgcgggtattgcgacccaaatggtggtggaacgtaaaattgcggctgaagaaggcaaaactcgccacgattatggtcgtgaagcgttcatcaacaaaatttgggattggaaagcttattcaggtggcacaatcagccaacaaatgcgtcgtttaggaaactctatcgactgggaacgtgaacgtttcaccatggatgatggtttatcgaatgcagtaaaagaagtgtttgttcgcttgcatgaagaagggttgatttaccgtggcaaacgcttagtaaactgggatccaaaacttcacaccgcaatttctgatttagaagttgaaaataaagaaagcaaaggctccctttggcatttccgctatccgttagctaacgatgcaaaaacggcagatggtaaagattatttagtggtcgcaaccacacgtccagaaaccatgttgggcgatacggcggtggcagttcatccagaagatgagcgttatcaatctttaatcggtaaaacagtgattctgccattggcaaaccgtgaaattccgattattgctgatgaatacgtcgatcgtgaattcggtacaggtgtcgtgaaaatcaccccagcacacgatttcaacgactatgaagtgggtaaacgtcataatttaccaatggtaaatgtattgacgctgaacgcaaatattcgtgatgaagcggaaattatcggtactgacggcaaaccacttgctggctatgaagcgacaattcctgcggattaccgtggcttagaacgttttgctgcgcgtaagaaaattgtcgcagattttgaagcactgggtttattagacgaaattaaaccacacgatttgaaagtgccttatggcgaccgtggcggtgtgccaattgagccgatgctaactgaccaatggtatgtaagcgtaaaaccacttgctgatgtggcaattaaagcggtggaagatggcgaaatccaattcgtgccgaaacaatacgaaaacctttacttctcttggatgcgtgatattcaagattggtgtatttctcgccaactttggtggggacaccgcattccagcgtggtatgacgcagaaggcaacgtgtatgtcgcgcgtaacgaagaagaagtgcggtcaaaatataacttagattctgcggttgaactcaaacaagatgaagacgtgttagatacgtggttctcatcaggcttatggacgttctctaccttaggttggccagagcaaactaaagagctcaaaatgttccatccaacggatgtgttaattacaggctttgacatcatcttcttctgggttgcacgtatgattatgtttacgatgcacttcgtaaaagatgaaaacggcaaaccacaagtaccattcaaaaccgtgtacgtaacaggcttgatccgtgatgaacaaggtcaaaaaatgtcgaaatcgaaaggtaacgtgcttgacccaatcgatatgattgacggtattagccttgaagatttacttgaaaaacgtactggcaacatgatgcagccgcaattagcagagaaaattgctaaagcaacgcgcaaagaattcgctgaaggtattgcggctcacggtacagatgcattgcgtttcacattagcggcattagcttcaaacggtcgtgacatcaactgggatatgaaacgtttagagggctaccgtaatttctgtaacaaattatggaatgcaagccgtttcgtcttaacgaatgaaaaattagatttaagccaaggcgaaattgaattctcattagcggatcgttggattcaatcagaattcaatcgtaccgtggaaactttccgtaattcattaagccaatatcgtttcgacctttgtgccaatgcgatttatgagtttacttggaaccaattctgtgactggtatttagaattgactaaaccagtatttgccaacggcaacgcagcacaaatccgtgcggcaagccaaactttggttcatgtgttagaaaaattattacgtttagcgcatccgctgattccatttattaccgaagaaatttggcaaaaagtgaaaggatttgtcggcattactgctgatagcattatgttacaacctttcccacaagtggaagagagcggctttgatccagaagcggaagctgaaattgagtggttaaaagaagtgatcgttgcggtgcgtaatattcgtgcagaaagcaacatcgcaccaagtaaaggtttagatctgttattccgtaatttaagcacagaaaatgcaaaaattctcgaaaaacagaccgctcttttaaaagccatggcgaaattagacaacgttcaagtgttagccgcaaacgaaacagcaccacttgccgtagcgaaattagtcggcaatgcggaattactcgtaccaatggctggctttatcaataaagaagccgagcttgcccgtttaaccaaagagattgaaaaatatcaaaacgaagttaaacgtatcgagaataaacttagcaatgaagcttttgtggctaaagcacctgaagcagtgattgcgaaagaacgcgaaaaacaagcggaataccaatctggattagaaaaaatccaagagcagtataaggcgattgaggcgttgtaa

SEQ ID NO: 2950 - protein, 954 aa, Haemophilus influenzae
MTQKFEMVDRFNPSAVEQALYQHWEESGYFKPTENEHAPSYCIAIPPPNVTGSLHMGHAFQQTLMDTLVRFNRMEGHNTLWQAGTDHAGIATQMVVERKIAAEEGKTRHDYGREAFINKIWDWKAYSGGTISQQMRRLGNSIDWERERFTMDDGLSNAVKEVFVRLHEEGLIYRGKRLVNWDPKLHTAISDLEVENKESKGSLWHFRYPLANDAKTADGKDYLVVATTRPETMLGDTAVAVHPEDERYQSLIGKTVILPLANREIPIIADEYVDREFGTGVVKITPAHDFNDYEVGKRHNLPMVNVLTLNANIRDEAEIIGTDGKPLAGYEATIPADYRGLERFAARKKIVADFEALGLLDEIKPHDLKVPYGDRGGVPIEPMLTDQWYVSVKPLADVAIKAVEDGEIQFVPKQYENLYFSWMRDIQDWCISRQLWWGHRIPAWYDAEGNVYVARNEEEVRSKYNLDSAVELKQDEDVLDTWFSSGLWTFSTLGWPEQTKELKMFHPTDVLITGFDIIFFWVARMIMFTMHFVKDENGKPQVPFKTVYVTGLIRDEQGQKMSKSKGNVLDPIDMIDGISLEDLLEKRTGNMMQPQLAEKIAKATRKEFAEGIAAHGTDALRFTLAALASNGRDINWDMKRLEGYRNFCNKLWNASRFVLTNEKLDLSQGEIEFSLADRWIQSEFNRTVETFRNSLSQYRFDLCANAIYEFTWNQFCDWYLELTKPVFANGNAAQIRAASQTLVHVLEKLLRLAHPLIPFITEEIWQKVKGFVGITADSIMLQPFPQVEESGFDPEAEAEIEWLKEVIVAVRNIRAESNIAPSKGLDLLFRNLSTENAKILEKQTALLKAMAKLDNVQVLAANETAPLAVAKLVGNAELLVPMAGFINKEAELARLTKEIEKYQNEVKRIENKLSNEAFVAKAPEAVIAKEREKQAEYQSGLEKIQEQYKAIEAL

SEQ ID NO: 2951 - DNA, 930 bp, Haemophilus influenzae
atgatagactgtatttataattctgattctatttttgaaataaaaaaattggatagtaattctattcatgcaattatctctgatattccttatggaattgattatgatgattgggatatattgcattccaatactaatagtgcattaggaggaacatcttcagctcaacacaaaacatcattgtttaaacgaagaggtaaaccattaaatggttggtcagaggctgataagaaaagaccgcaagagtatcaagagtgggttgaaagttggtctaatgaatggtttagagtattaaagtcaggaagttcagtctttgtttttgcaggaagacaatttgcacacagagttgttgttgcgtttgaaaatagtggttttactttcaaagatatgttgagttgggaaaaagacaaagctccacatagagcacaaagaatttcttgtgtgtttgaacgtcgaggcgatattgctaatactaataaatgggttggttggagagttgctaatttacgacctttatttgagcctattttatggtttcaaaaaccatataaaactggcagtacattagctgataatttaatcaaacatgaagttggagcttggaatgaaaattcgttaactcattggaatatacaacaaggagctttaaatcattctaatatactaaaagtaagaataacttctgaggacaaaggttatcatgttgctcaaaaaccacttaatctaatgaaattgcttattgatttagtaacaaaagaagaacaaattgtattagatccttttgctggtagtggtactacattattagcagctaaagaattaaatagacatttcattggatatgagaaaaataatggaatatataatattgcagttaatcgtttagggatagaaaaaaataactgcttttataataaagagaaaaaataa

SEQ ID NO: 2952 - protein, 309 aa, Haemophilus influenzae
MIDCIYNSDSIFEIKKLDSNSIHAIISDIPYGIDYDDWDILHSNTNSALGGTSSAQHKTSLFKRRGKPLNGWSEADKKRPQEYQEWVESWSNEWFRVLKSGSSVFVFAGRQFAHRVVVAFENSGFTFKDMLSWEKDKAPHRAQRISCVFERRGDIANTNKWVGWRVANLRPLFEPILWFQKPYKTGSTLADNLIKHEVGAWNENSLTHWNIQQGALNHSNILKVRITSEDKGYHVAQKPLNLMKLLIDLVTKEEQIVLDPFAGSGTTLLAAKELNRHFIGYEKNNGIYNIAVNRLGIEKNNCFYNKEKK

SEQ ID NO: 2953 - DNA, 777 bp, Haemophilus influenzae
ttggttagatctattggaatacttcctgaggcaataaaaccaagttctacacaagagaaattattctcaaaagcaggagatattgtattagttaaagcttttcaattacttaatctgaactcaaaaccattagaacagagaggtaatgctggagatgtgatagcactctctaaagaatttaattacggcttagttgctgatgctaaatcttttcgacttagtcgtactgctaaaaatcaaaaagattttaaagtaaaagcgttaagtgaatggcgagaagataaggattatgcagtattaacagcaccattttttcaatatcctacaactaaaagtcaaatttttaagcaatcgttagatgaaaatgttttgttatttagttgggaacatttagctatattattacagttagatttagaggaaactaatattttttcttttgagcaattatggaactttcccaaaaagcaaagtaaaaaaacatctgtatctgatgctgaaaataattttatgagagattttaataaatactttatggatttatttaaaatagataaagatactttaaatcaacttcttcaaaaagagatcaattttattgaagaaagatccttgatagaaaaggaatattggaaaaaacaaataaatattataaaaaattttacaagagaagaagccatagaagcattattgaaagatataaatatgtcttcaaaaatagaaactattgatagttttattaaagggataaaaagtaatgatagactgtatttataa

SEQ ID NO: 2954 - protein, 258 aa, Haemophilus influenzae
MVRSIGILPEAIKPSSTQEKLFSKAGDIVLVKAFQLLNLNSKPLEQRGNAGDVIALSKEFNYGLVADAKSFRLSRTAKNQKDFKVKALSEWREDKDYAVLTAPFFQYPTTKSQIFKQSLDENVLLFSWEHLAILLQLDLEETNIFSFEQLWNFPKKQSKKTSVSDAENNFMRDFNKYFMDLFKIDKDTLNQLLQKEINFIEERSLIEKEYWKKQINIIKNFTREEAIEALLKDINMSSKIETIDSFIKGIKSNDRLYL

SEQ ID NO: 2955 - DNA, 468 bp, Haemophilus influenzae
ttgtcatattgtgatgaaatttttatttatgataattcaggcattacacccgaattgatttttcaactaaaatataaccgctctttaaggatcaaaatgcaatcaaatgacatcactttttaccaacgttttgaagccgatattctcgcagggcgtaaaaccatcaccatccgagataaatctgaaagccattttaaagcaggcgatattttacgtgtggggcggtttgaagataatcaatatttctgcacgattgaagtgttaagtgtatcgccgattactcttaatgaactgacggaacaacatgcgaagcaggagaatatggggttgaatgagttgaaagaagtgattcgggggatttatccgaatgagattatcttttgggtaattcaatttagcttaaaggagtattttaatgaagaaaagtgcgttagagaaattattatcactgatagaaaatttaactaa

SEQ ID NO: 2956 - protein, 155 aa, Haemophilus influenzae
MSYCDEIFIYDNSGITPELIFQLKYNRSLRIKMQSNDITFYQRFEADILAGRKTITIRDKSESHFKAGDILRVGRFEDNQYFCTIEVLSVSPITLNELTEQHAKQENMGLNELKEVIRGIYPNEIIFWVIQFSLKEYFNEEKCVREIIITDRKFN

SEQ ID NO: 2957 - DNA, 321 bp, Haemophilus influenzae
gtgcaaattgtgattgattctgatcatattgcaatgcagattaatcctcaaaatccaagacttgctgatattgatgcaggcagaaaagcgatagagctatttcgttttgctattaagctacatattgatttttccatggaatcgacactttcaggtaattcaattattcagagaataaagaacgctaaagaaaatggtttctatgtacatttaaattatattggtattaatcgcattgaaataaatcttgcacggattaaggcaagagtaaaaagtggtggtcattttattgctgaagatattgtaaaatatcgttattaa

SEQ ID NO: 2958 - protein, 106 aa, Haemophilus influenzae
MQIVIDSDHIAMQINPQNPRLADIDAGRKAIELFRFAIKLHIDFSMESTLSGNSIIQRIKNAKENGFYVHLNYIGINRIEINLARIKARVKSGGHFIAEDIVKYRY

SEQ ID NO: 2959 - DNA, 435 bp, Haemophilus influenzae
atggcaaaaactgcacaattttatattcttacggaaaattgtactttaactgtcgaagaaatagcctgtaatcttgctgcttcaatatggcgttcagggaaaaaagtactaattagttgcgaaagtgaggctcaagcgctagagattgacgagcgtttgtggcaacgagatcccaatgaatttgttccgcataatttatcaggggaggcaacacaatatcccacaccgattgagatttcatggcttgggaaacgaaatttacaacgccgtgatgtgttaattaatttgcaacaagaaattccagattttagccacagttttacccaaattattgattttgtgccgaaagatgatgcgttaaaaacacaagcccgagaacgttataaacaattacgtctgcaaggttggaatctttctactgaaaatgtgggttaa

SEQ ID NO: 2960 - protein, 144 aa, Haemophilus influenzae
MAKTAQFYILTENCTLTVEEIACNLAASIWRSGKKVLISCESEAQALEIDERLWQRDPNEFVPHNLSGEATQYPTPIEISWLGKRNLQRRDVLINLQQEIPDFSHSFTQIIDFVPKDDALKTQARERYKQLRLQGWNLSTENVG

SEQ ID NO: 2961 - DNA, 1395 bp, Haemophilus influenzae
atggcatttcgtattgaaaaagacacaatgggtgaagttcaagttccagcagataaatactgggctgcacaaactgaacgttcacgcaataactttaaaattggttcagccgcatcaatgccacatgaaattatcgaagcttttggctatctgaaaaaagcagccgcatttgctaatcatgatttaggtgtattacctcttgaaaaacgtgatttaattgctctagcttgtgacgaaattttagcaaataaattagatgatcaattcccacttgttatttggcaaactggttcaggcacacaatccaatatgaatgtgaatgaagtggttgccaatcgtgctcatgtgttaaacggtggaaaattaggcgaaaaatctattattcacccaaatgatgatgtgaacaaatcacaatcttcaaatgatactttcccaacggcaatgcacattgcggcatataaaaaagtagttgagcacaccattccttgtgttgaacgtttacaaaaaacttttgcggcaaaatctgaagccttcaaaaacgtggtaaaaattggccgcactcacttaatggatgcaacgccactcacattaggtcaagaattttcggcttatgcggctcaattagatttcggcttaaaagcattaaaaaatacgctgccacatttaagccaattagcattgggtggaactgcggttggcacaggtttgaacacgccgaaaggctatgatgtgaaagtggcagattacattgcaaaattcaccgcacttccgtttgtcacagcagataataaatttgaagcattagccgctcatgatgcgattgttgaaactcacggtgcattacgtcaattagcaatgagtttatttaaaattgcgaatgatattcgtctattagcatctggccctcgttcgggaattggcgaaattttaattcctgaaaatgaaccaggttcttcaattatgccaggtaaagtaaacccaactcaatgtgaagcgatgacaatggtctgcgcacaagtatttggtaacgacaccaccatcgcatttgtgggttcacaaggtcacttccaattaaatgtgttcaaccctgtgatgattgcaaacttcttacaatctgctcaattattgggcgatgcttgcgtatcttttgatgaacactgtgctgtaggtattgaaccaaactatcctcgaattaaacaacaacttgaaaattcattgatgttggtgaccgcacttaatacacatattggctatgaaaacgcagctaaaattgcaaaaacggcgcacaaaaatggcacaacattgcgtgaagaagcgattaatttaggtttagtgtctgccgaagattttgataaatgggttcgcccagaagatatggtgggtagcctaaaataa

SEQ ID NO: 2962 - protein, 464 aa, Haemophilus influenzae
MAFRIEKDTMGEVQVPADKYWAAQTERSRNNFKIGSAASMPHEIIEAFGYLKKAAAFANHDLGVLPLEKRDLIALACDEILANKLDDQFPLVIWQTGSGTQSNMNVNEVVANRAHVLNGGKLGEKSIIHPNDDVNKSQSSNDTFPTAMHIAAYKKVVEHTIPCVERLQKTFAAKSEAFKNVVKIGRTHLMDATPLTLGQEFSAYAAQLDFGLKALKNTLPHLSQLALGGTAVGTGLNTPKGYDVKVADYIAKFTALPFVTADNKFEALAAHDAIVETHGALRQLAMSLFKIANDIRLLASGPRSGIGEILIPENEPGSSIMPGKVNPTQCEAMTMVCAQVFGNDTTIAFVGSQGHFQLNVFNPVMIANFLQSAQLLGDACVSFDEHCAVGIEPNYPRIKQQLENSLMLVTALNTHIGYENAAKIAKTAHKNGTTLREEAINLGLVSAEDFDKWVRPEDMVGSLK

SEQ ID NO: 2963 - DNA, 609 bp, Haemophilus influenzae
atgaaaatgaaatccctttttgtggcaatgataacgtttttttctaccgcaccttttgctcattggcaacccatcggaaatgccgaatacacttgggggccgttccatgtttataccattggtttgttttctgaaactggcacttatcaagaaaatgaacgtccattaatgctctctttcaaatatgaaaaacccattgaaggaaaaaattttgcgattacgctcattaaagaaatcgaaaccttaaaacttaatgatggcgatactcaaagctggcttaaagaaatgcaatccacatttccggatttttcaccaaacgatatcttgaactatattgccttacccgataaaggttactttgtcttaaatgatacagttttggaacacgattttgatgctaaatttaatcaggcatttatcggtatctggcttgcaccgaatagtacttttgtaaaacttcagccacaattattaggcaaaacgaaaagtaatcatgaagcggctgaattttatctcaaacctgaaattgaatcctttgatgaacaagattctacacctgaattaccgccaaattatttattagatagtcagaaaaaatctcaaggataa

SEQ ID NO: 2964 - protein, 202 aa, Haemophilus influenzae
MKMKSLFVAMITFFSTAPFAHWQPIGNAEYTWGPFHVYTIGLFSETGTYQENERPLMLSFKYEKPIEGKNFAITLIKEIETLKLNDGDTQSWLKEMQSTFPDFSPNDILNYIALPDKGYFVLNDTVLEHDFDAKFNQAFIGIWLAPNSTFVKLQPQLLGKTKSNHEAAEFYLKPEIESFDEQDSTPELPPNYLLDSQKKSQG

SEQ ID NO: 2965 - DNA, 825 bp, Haemophilus influenzae
atgacaaaaaaatacgacttacattgtcacagcaccgcatcagatggagtgttgagtccaactgaattagcgcatcgtgcttatgcgcaaggcgtgaacgtgcttgcattatgcgatcacgatacgattgcgggtattgatgaagctgagattgcagcgaaagaagtaggcattgaattgattactggagtagaaatctcgacaaattgggaagggcgagggatccatattgtaggattaaacttcgataaaactcatccaaaaatgaccgcacttttgcaaagtcaaaaagcattacgggaaaaaagagcggtggaaattggcgataaattagaaaaagcagggattcctaatgcttatgaaggtgcgaaagctttagccgatggcgaagtgacgcgtgctcattacgcacgttatttggtgcagattggtaaggtatctaatgatggtcaggcctttaaacgctatttagggcaaggaaaatcggcatttgttaaagctgaatggactgatgttcccacggcgattgagacaatccatgccgcaggcggtgtagccgttattgcgcatccattgcgttataacatgacagggaaatgggtgcgtaagctgataaccgattttaaggcttggggcggtgatggcatggaaatggcggattgtggtcaggcaaaagatcagcgtcaaatgcttgctcgttgggcaaaagaatttgatttactgggttcggttggttctgatttccatttcccttgtggttgggttgagttaggaaaaaatttagatttagttgatagcgttatcccagtttgggaaaaattttag

SEQ ID NO: 2966 - protein, 274 aa, Haemophilus influenzae
MTKKYDLHCHSTASDGVLSPTELAHRAYAQGVNVLALCDHDTIAGIDEAEIAAKEVGIELITGVEISTNWEGRGIHIVGLNFDKTHPKMTALLQSQKALREKRAVEIGDKLEKAGIPNAYEGAKALADGEVTRAHYARYLVQIGKVSNDGQAFKRYLGQGKSAFVKAEWTDVPTAIETIHAAGGVAVIAHPLRYNMTGKWVRKLITDFKAWGGDGMEMADCGQAKDQRQMLARWAKEFDLLGSVGSDFHFPCGWVELGKNLDLVDSVIPVWEKF

SEQ ID NO: 2967 - DNA, 987 bp, Haemophilus influenzae
atggatgctgaaaaggctcataatttcacgattcaatgcttgaaattagccagtaatcctttatttcaaccgatcttaaaatctcttattcatgctcccaaaggctttccgaaaacggtaatgggtgtaaattttcctaatcccattggattggcggcaggagcggataaaaatggagatgcaattaatggtttcggtacattgggttttggttttttagaactgggaactgtcacgcccgttgcacaagatgggaatgcaaagccacgtcagtttcgtttgattgaagctgaaggcattattaaccgtaatggttttaataataatggtattgactatcttatagaaaatgtgaaaaacgcccgttataaaggtgtgataggcatcaatattggtaagaataaattcacacctttggaacaaggcaaagatgattatattttctgtttgaacaaagcctataactacgcaggttatattacggtgaatatttcatctcccaatacaccagatttgcgtcaattacaatatggtgattatttcgatgatttattgcgaagcatcaaggatcgtcaggctattttggcaaaccaatacaataaatatgtgccgattgcggtaaaaattgcaccagatttaacggaaagtgaattagtacaaattgcggatacattggttcgtcataaaatggatggcgttattgcaacgaatactacaatttctcgtgatacggttacggggatgaaaaatgccgaacagcaaggcggattaagtggaaagccgttgcagcataaaagcacagagattattaagcgattacatcaagaactgaaaggtcagattcccattattggtagcggcggcattgatggtttgcaaaatgcgcaagagaaaattgaggctggcgccgagttgttgcaagtttattcaggattgatttatcacggtccaaaattagtaaaagaattagtaaaaaatattaaataa

SEQ ID NO: 2968 - protein, 328 aa, Haemophilus influenzae
MDAEKAHNFTIQCLKLASNPLFQPILKSLIHAPKGFPKTVMGVNFPNPIGLAAGADKNGDAINGFGTLGFGFLELGTVTPVAQDGNAKPRQFRLIEAEGIINRNGFNNNGIDYLIENVKNARYKGVIGINIGKNKFTPLEQGKDDYIFCLNKAYNYAGYITVNISSPNTPDLRQLQYGDYFDDLLRSIKDRQAILANQYNKYVPIAVKIAPDLTESELVQIADTLVRHKMDGVIATNTTISRDTVTGMKNAEQQGGLSGKPLQHKSTEIIKRLHQELKGQIPIIGSGGIDGLQNAQEKIEAGAELLQVYSGLIYHGPKLVKELVKNIK

SEQ ID NO: 2969 - DNA, 288 bp, Haemophilus influenzae
ttgctggcaggttatccacagacagaaattgaaagtttttaccgccaagagaaagaagcgttagcgtggcaggcggataattcaacagaaaccccaatgctaacacaaatcgcccaaaatcgtggtgtggtagaaaaagtgattgagaaatccgcccagtttgctgtcgtgattggcatcattatcggacaacgtcaagcatttgaagaccgtttgttggctttaaaaacaccagaggaattaaccgcacttgaacaggagattgaacaatggcaattcccaacataa

SEQ ID NO: 2970 - protein, 95 aa, Haemophilus influenzae
MLAGYPQTEIESFYRQEKEALAWQADNSTETPMLTQIAQNRGVVEKVIEKSAQFAVVIGIIIGQRQAFEDRLLALKTPEELTALEQEIEQWQFPT

SEQ ID NO: 2971 - DNA, 234 bp, Haemophilus influenzae
atgactatgtactataaaaacggtttttttgactattcttatggtggttttgtgccagaaggtgcggtagaaattagccaagaaacctaccttgagctgcttaacggacaagcccaaggtaaacaaatcatcgcagacaacacagggtatcctgcactgatggagccacaacccagtgcggcacacgagttaaatcttgacaccctcacgtgggaaatttcaaccgaaaaataa

SEQ ID NO: 2972 - protein, 77 aa, Haemophilus influenzae
MTMYYKNGFFDYSYGGFVPEGAVEISQETYLELLNGQAQGKQIIADNTGYPALMEPQPSAAHELNLDTLTWEISTEK

SEQ ID NO: 2973 - DNA, 1221 bp, Haemophilus influenzae
atgaaagcatttttgcatcatctgcaaaacgaggcgaagttgataatttccccgacttattgcgtggatggggagtttgccttaagtgaaattgcacgggcaacgttacaacaatatgggatcgtgcaactaagctcagccactaacagcgacagcgaaaccgaagccgcaacatcaaaagccgtgaaaaccgcctatgacaaagcagtagaagccaaaactaccgcagatggaaaggttggtttaaatggtaacgaaagcattaatggcgagaaatcctttgaaaatcgtattgtggcaaaaagaaatatccgtatttcagacagccagcactatgcttcacacggagaccatttaaatatcggggcaaacaatggcgattgctggttcgaatataaatcaaacaaccgagagattggcacacttcgtatacacgctaacggcgatttaacctacaaacgccaaaaaatctaccacgctggggcaaaaccccaatttaatacggatattgaaggcaagcctaatacacttgcaggctatggtattgggaattttaaagtagaagagtttcgtggaaatttaaacaccttaaaaaccgatggcatctatgcaattacgcaagcaagccgctctcaaaatctgcccgtatcgaccagttatcacatccaagttattgctggaagtgatggagcttggtgccgtcaattagcttatgtggcatacagcacagatatgtatgagcgacatcagacaagccaagccgaagacaactggagcgcatgggttaagttaaatgatatagagccagtaagggagttgctgagtacaaaggcgaatataagtcacacgcatacagtaaatcagattacgaattttaataaagcagtaaatgccgtaattgatagtgcatttacttatcaaaaaattggtgattttgagattcggaaatatccagacgggacgatgattcagactggtctagttgtttttacagttgtttttactcgagaaggtactactgtgcatacagatttagtcctgcctattgcatatgtaaataaagattatcgatgttttattacagaacgatacgaatcaagagcaagcggaaaggggcaatacaactgggtatttatgcaagccaaaactaatacaactgcgaaagtaacaagttggtatttggggtcagcagattggatgactattgggagatggaaataa

SEQ ID NO: 2974 - protein, 406 aa, Haemophilus influenzae
MKAFLHHLQNEAKLIISPTYCVDGEFALSEIARATLQQYGIVQLSSATNSDSETEAATSKAVKTAYDKAVEAKTTADGKVGLNGNESINGEKSFENRIVAKRNIRISDSQHYASHGDHLNIGANNGDCWFEYKSNNREIGTLRIHANGDLTYKRQKIYHAGAKPQFNTDIEGKPNTLAGYGIGNFKVEEFRGNLNTLKTDGIYAITQASRSQNLPVSTSYHIQVIAGSDGAWCRQLAYVAYSTDMYERHQTSQAEDNWSAWVKLNDIEPVRELLSTKANISHTHTVNQITNFNKAVNAVIDSAFTYQKIGDFEIRKYPDGTMIQTGLVVFTVVFTREGTTVHTDLVLPIAYVNKDYRCFITERYESRASGKGQYNWVFMQAKTNTTAKVTSWYLGSADWMTIGRWK

SEQ ID NO: 2975 - DNA, 576 bp, Haemophilus influenzae
atgggctattctgatttgttgatttggcaataccgaaacaagcctaaagccgtctcaacgattaagctatttgaaagcattatcgggcaaggctttatcgatttatatcgattgcaagatgtgttgaatattgaaacagcaacagggcatcagcttgatttggtcggtaaacacatcgggcaatttcgggttattaatggctatcaattacgtaaatttttcggtttccgcaattcgcccaatgcacttggatttagccaaaaaagactaggcggtgcgcaatggtatcgtaaacgagatccgttgtctgattccgtcagattatccgatgatgattatcggttcctgattaaatgcagaatccttaaaaactaccaaataggcacgctaccaaacttaattgaggcgtgcctatttatttttggcgaaggttgtcacatcgtggataactacgatatgaccgtctctatctctgttccaagtgcgagcacatctgatttcaagaaattcgcaatcaaccacttaggtatactaccacgccaagccggtgtgcaatatcttttcaacctaatatag

SEQ ID NO: 2976 - protein, 191 aa, Haemophilus influenzae
MGYSDLLIWQYRNKPKAVSTIKLFESIIGQGFIDLYRLQDVLNIETATGHQLDLVGKHIGQFRVINGYQLRKFFGFRNSPNALGFSQKRLGGAQWYRKRDPLSDSVRLSDDDYRFLIKCRILKNYQIGTLPNLIEACLFIFGEGCHIVDNYDMTVSISVPSASTSDFKKFAINHLGILPRQAGVQYLFNLI

SEQ ID NO: 2977 - DNA, 510 bp, Haemophilus influenzae
ttgcctgatgttagacaagttaaagtactagaaaataacactaaacaacgtgataaatatggtgtagagcctaactccttgaatattattgtagatggcggggcagatgagcaaatcgctcacgtcatttatgaaaataaaggggcaggggtcgggttgcaaggtgccgcagaaacaactttaacggtaaatggcgagcgtagagcaatacggttcgaccgtgcaacgcctgttgatgtgcaagtatctatgcattgtgttcgatatgaagattttactgaagtggataaggatgaaatcaaacgattattatccattcaacgctttggcatcgggcaaaatctttcgctttccagactttattcgccaattaataaagtgggcggtttctgggtgaaagaactaaaaatcgggcgtaaagggcagtctcttgccacggaaaatattaccgcacaaccacgtgaattaatccgaattttagcaacggatataaccattgaggtggaataa

SEQ ID NO: 2978 - protein, 169 aa, Haemophilus influenzae
MPDVRQVKVLENNTKQRDKYGVEPNSLNIIVDGGADEQIAHVIYENKGAGVGLQGAAETTLTVNGERRAIRFDRATPVDVQVSMHCVRYEDFTEVDKDEIKRLLSIQRFGIGQNLSLSRLYSPINKVGGFWVKELKIGRKGQSLATENITAQPRELIRILATDITIEVE

SEQ ID NO: 2979 - DNA, 498 bp, Haemophilus influenzae
atgggcaaaattattgacctatcgcctaactcgcctgatgggcaaatggtgggcttgcttgctcagatgaagatggatattgaggagcttgccgagaatgtgtatcgacagttagatcctgatgttgcgacaggtgcttggctcgatcagcgtgttgcttatgcaggattaataagacgagcggcaagttatagctatttacgctcagtgattttgacaggagagccattaactcatctttatgcagggattgtagtgtctgacccacataaagtgcggtgggtattaacggcagatgtgcagctagatagtaatggctccgcccgtgcggacttccgcagcgaagaattgggtgcgtttaacctcataaaaaacacgaatttgaccattgagaccgttacgcttgggcttacctcggcaaccacattcgaaaatgcagaaattggcaaggaagaagaaacagacttgcaattacgagaacgttttttcatcagctga

SEQ ID NO: 2980 - protein, 165 aa, Haemophilus influenzae
MGKIIDLSPNSPDGQMVGLLAQMKMDIEELAENVYRQLDPDVATGAWLDQRVAYAGLIRRAASYSYLRSVILTGEPLTHLYAGIVVSDPHKVRWVLTADVQLDSNGSARADFRSEELGAFNLIKNTNLTIETVTLGLTSATTFENAEIGKEEETDLQLRERFFIS

SEQ ID NO: 2981 - DNA, 102 bp, Haemophilus influenzae
atggcaaaactgattgaaaccggcattcaaattgagcgattaaacgaaatcgtggcacgatttgaagagggatttagacaaatctatgggcaaaattattga

SEQ ID NO: 2982 - protein, 33 aa, Haemophilus influenzae
MAKLIETGIQIERLNEIVARFEEGFRQIYGQNY

SEQ ID NO: 2983 - DNA, 354 bp, Haemophilus influenzae
atgagcgtaagacgacttaataaagagcacgattggacatttggacaaggcttttcaaactacgcaagcgaatcagatgccattgctcaaaatgtgcaaactcgcctttggtcatttgctaatggctggtttttagaccttgagcatggtttaccttggcttgaacaaatggggcgtggggtaaatatggcaggctgggaaatcaaaataaaacgctatgtgttagaaactgaaggggtaagcagaataactgattaccaagctaattttgatgcagatacacgcaagctgaccatatcgattgattaccaagatatttacggacagcaacagaccgcacgctatgacacttaa

SEQ ID NO: 2984 - protein, 117 aa, Haemophilus influenzae
MSVRRLNKEHDWTFGQGFSNYASESDAIAQNVQTRLWSFANGWFLDLEHGLPWLEQMGRGVNMAGWEIKIKRYVLETEGVSRITDYQANFDADTRKLTISIDYQDIYGQQQTARYDT

SEQ ID NO: 2985 - DNA, 645 bp, Haemophilus influenzae
atgaactacgcacaaatcttagctacgccagaaaccgcaacagaccatcaaatccaacaaaaccaactgaatttacataccgcacttcctgcaaaagtcgtgagttttgacccagccaagcaaaccgtatcacttgcgatacaaataaaaatgcagttagtcgatgggagtggggcagatataccgcctcttcttgatgtacccgtgagctttcctcgtggcggtggctttgcagtgacatttccacttaaagcaggcgatgagggaatagccatattttctgagcgttgcattgacggatggtggcaaaacggcagcgcatcaacgcctttagattttaggttgcatgatttatctgatgcgatgtttattcctggtatatgctctgtgccgaaagctataggtggattttttaccgatgggttatccatgcaaacccttgatggcagcacatacatcagaatcaaaaacggttcgattttgattaaagggaatatcgaacatcagggcgatacctcgcaaacaggttcgcatagctccacaggcgttatctcgagcgatacagatgtaacagcgggcggtatttcaggcaaaacccataaacatacaggcgatagtggcggtaaaacaggagtgccagaatga

SEQ ID NO: 2986 - protein, 214 aa, Haemophilus influenzae
MNYAQILATPETATDHQIQQNQLNLHTALPAKVVSFDPAKQTVSLAIQIKMQLVDGSGADIPPLLDVPVSFPRGGGFAVTFPLKAGDEGIAIFSERCIDGWWQNGSASTPLDFRLHDLSDAMFIPGICSVPKAIGGFFTDGLSMQTLDGSTYIRIKNGSILIKGNIEHQGDTSQTGSHSSTGVISSDTDVTAGGISGKTHKHTGDSGGKTGVPE

SEQ ID NO: 2987 - DNA, 459 bp, Haemophilus influenzae
  misc_feature 4, 5, 6, 7, 8: n is any nucleotide
atgnnnnnatccctaatcaacggaaactccctcgggggtagagtattaaacggcaatagtcgagatattctcaacaaaattgcacgcaataacaaggctgattggtctatccaagatggcgcgcttattttcttgccaaaagataaagtgctaaatgatgacgctgtactaatttctcaagatacaggaatgattaatgcaccagaacaaaccgatgagggattagagctgacttgtttactcaaccctgcattacaaattggcggacttgtgaaagttgaatctatcattgagtacttcaatggggagtacaagattgtaaaacttgcgcattctggcgatggcatcggtggggattggcatagcaaaataacagttgtcgggggaaaattccaaaaagtggaaaaagaaaagggcagtcagacatcaaataaacaaagcaaggataagaacaaatga

SEQ ID NO: 2988 - protein, 152 aa, Haemophilus influenzae
  VARIANT 2, 3: Xaa is any amino acid
MXXSLINGNSLGGRVLNGNSRDILNKIARNNKADWSIQDGALIFLPKDKVLNDDAVLISQDTGMINAPEQTDEGLELTCLLNPALQIGGLVKVESIIEYFNGEYKIVKLAHSGDGIGGDWHSKITVVGGKFQKVEKEKGSQTSNKQSKDKNK

SEQ ID NO: 2989 - DNA, 345 bp, Haemophilus influenzae
atgaaacaatttggcagacgttggaaactggacattagtaacgaccaagaaacgttaagcattgagcaattacgtgttgcgtttgaaattgataaaaccatcaatgaaaagcctaatcccgctaaaatccaagtgtggaacttaaatcgagaccatatcaaccaattattaagccaagactataagaaagtcgccttatcggttggttatggcgagttacgccaaatttatgtgggagatattaccaagacgagaatccaacgagagggattggattttgttcttacgcttgagtgttcagatgggcatcaagcctatactcagtcgagagctaaaacgacatwa

SEQ ID NO: 2990 - protein, 115 aa, Haemophilus influenzae
  VARIANT 115: Xaa is any amino acid
MKQFGRRWKLDISNDQETLSIEQLRVAFEIDKTINEKPNPAKIQVWNLNRDHINQLLSQDYKKVALSVGYGELRQIYVGDITKTRIQREGLDFVLTLECSDGHQAYTQSRAKTTX

SEQ ID NO: 2991 - DNA, 180 bp, Haemophilus influenzae
ttgagtaagtatagcaaaactaagttaaaaatacacttaaaagaggggttagaaatggaaacaaatgcaagtccgattatgcgaggtgcaatcgcattctctattgttatcgttgcgcttggcttgtttgctttatgtattacaccgttggcgaatgtccttattgagtttgctaaataa

SEQ ID NO: 2992 - protein, 59 aa, Haemophilus influenzae
MSKYSKTKLKIHLKEGLEMETNASPIMRGAIAFSIVIVALGLFALCITPLANVLIEFAK

SEQ ID NO: 2993 - DNA, 321 bp, Haemophilus influenzae
atggtaagacgtatgcttaaaattccattaacacaacatccttatcaggaacaaacctttgaatttaacggcataaaaatccgcttaaccttgcgatttaatagtattggacagttttgggcaatggatgtatttgagtcagtaaaccaaaaacagatttgccgaggtcatgcgatcgcgtgcggagtaccattattggctcgcactacacagccttatttcttctatttggacgatgaaagcggtgctgaattagacccaatgagtatggaagatttaggcactcgatgctttttgtatataggcgaaaaggcatcgtaa

SEQ ID NO: 2994 - protein, 106 aa, Haemophilus influenzae
MVRRMLKIPLTQHPYQEQTFEFNGIKIRLTLRFNSIGQFWAMDVFESVNQKQICRGHAIACGVPLLARTTQPYFFYLDDESGAELDPMSMEDLGTRCFLYIGEKAS

SEQ ID NO: 2995 - DNA, 777 bp, Haemophilus influenzae
atgttaaattttgctcaagtatccaatcgtagtattggcacaataacgttcgatgtggttacaacagaagaccatcagtcggatttatctattacagaaaacccgattgaatcaggggctgccattgctgaccatgcggttattcagcctaaacaagttaccattaatggtgtaatggttgatcacgaccattcgacttttggtttagaccttccgtttatcggcaatattcgtggcgggatagactttcttaataactttcctttgccagttaaggttatcactcaaacatcgcaatctatcgcaaaagcgggtagagtgattagccaagttgcaggggcgtatagtcaagcgaagcgcacccttaatcaagcacgaaccatcgccccttttttgcctgattttggtctaggcggattgcttgatagcagtgcaggggatagtagagtgcaaaaatgctatgccgaccttgttgcttgccagaaatcaggggaaaccattgacatacagacaggcattaacttgtacaaaaacatgctaatccaatctgtagccgtcaatcaatcacaagatggcagtgcaacatttacgataacggctcgtgagatatttattgttgagacacaaacagctcaatctaaatcatctgcatcgggcaagagtaaaagtggtcgatcatcgattcaatctgtaacaaaatcgcagcaaggctctactcaaccaaagaacgatacacctaaaagaacctcctcgcttttcaatctttttaaatggtaa

SEQ ID NO: 2996 - protein, 258 aa, Haemophilus influenzae
MLNFAQVSNRSIGTITFDVVTTEDHQSDLSITENPIESGAAIADHAVIQPKQVTINGVMVDHDHSTFGLDLPFIGNIRGGIDFLNNFPLPVKVITQTSQSIAKAGRVISQVAGAYSQAKRTLNQARTIAPFLPDFGLGGLLDSSAGDSRVQKCYADLVACQKSGETIDIQTGINLYKNMLIQSVAVNQSQDGSATFTITAREIFIVETQTAQSKSSASGKSKSGRSSIQSVTKSQQGSTQPKNDTPKRTSSLFNLFKW

SEQ ID NO: 2997 - DNA, 2091 bp, Haemophilus influenzae
atgctactcgatgaactactgattaaaatcggcattgatgcggatagccaagcaatgcaacagtttgagcaattcctcaatgcaattggagacggcacggaaagtgcggcggaaaatcttggtacttttgctgaagctcttgaacgtgccgttgatgatgcaacagaacaaattaaagccgcacctgagtttgaaagtttttttgattcccttgaaaaactacaatctgaaacagaaaatctttctgaagatgatgccttagatgcgtgggtacaaaaactcatcgagggggataagctcttatctgagtttggtgagagttttcttcaaaacaccgaacagctctcgaaagagttacaagaagcgggattaagtgcagagcaggttgaaaaagttattggcaaactcaaatctgcgattgagcagaaaaccgatgctaccgaaaaagatacaaaagccgtagaagataacgccaaaagcacggaaaatttatctgacaatatcatcgacttgtgggcaacccaatatggtgcagtcggattactgaataaatttgaattgcttggcattagtatcaataaaactacacttaaagttgcggcatttggtgcagctttttacgctgccacaatcggggtaaagaattttgttgatgctaatctcgatgcactcgatgaaattaaacaactctcggctgtcacgggcgaatcagccgaccaaatttacaacttaggtaaggttgcagaggtcaatggctcatccgcacaggcggcacaatcatctattgaaggattatctcgcgtcattggcgaagctgcagcaggaattggtcgaggagcgaaatcatttgagcaatatggactaagcgccaaaaaggcgaatggagaggtaaaaacctcaagcgaaatgctgggtgaaatctcggacaagatgaaagcaatgggggagcaagagcaaattgcgatgcttgcgaaactcggtattgatagttcgatgattcaaaccttgcgccttggtaatgatgaactgaaagaacaaattgcccttgcaagtgtgctcacgcttggtgtgggtaatgcagaaaatgcaaaaaccgccgcggcttttaaagatgcgctgactcaggtttctcaggcttttagagctattggcgaatatgtctcactccgtgttgcaccatccattcagcgattagctgagcggtttacaaaatggttcaccgagaataatgcttttatcaaagcaacacttaacggctttggaaaaattctttcattcttgtttgagttagccgcagccatcgataatgttgttgagcatactattgggtggaaaaacttaatctacgcattaggtgcgacattattgtggtttagtcgcagaatgttattagctttcgctaccaaccctgtcacattgattataacggcaattgcagccttgtttttgcttgttgatgactttatcacttatcttgaaggcggcgaaactgcattaggtgaattttggaagccatttaaaacagcgttattgtgggttaaatccacttggaaaaattttgttgataactttagcgtcgatccaattggcgaaacattatctctcattacagatatgcttgagttgccatttaaacttgggcttgcgcttgttgttggtttgtggaatttatttactggcgaacagttagatttggatgttatcgagaccaagtttgctcaagttacagactggattaaaaagccattccaaagtgcatttgattgggttaagggttattacgaccaatatatcgcaccgattgttgatacagtaaaagggtggtttagtgatagtggtgaaaaggtaggaacggcaagtcaaaatacgaaagcctatgacacaatgatgtttgatccatcttatacttctgcaccacaagttgccgcagtaggggcgaaatctcaaacctcaaatgcagataatcgtgtgactaacagcaataacaaaattaccattacgcaacacatccaaggcacagataatccaaaagcagtggcagaccaatcggctcgagcgatcaataatcaactttcacctgttgtggggtaa

SEQ ID NO: 2998 - protein, 696 aa, Haemophilus influenzae
MLLDELLIKIGIDADSQAMQQFEQFLNAIGDGTESAAENLGTFAEALERAVDDATEQIKAAPEFESFFDSLEKLQSETENLSEDDALDAWVQKLIEGDKLLSEFGESFLQNTEQLSKELQEAGLSAEQVEKVIGKLKSAIEQKTDATEKDTKAVEDNAKSTENLSDNIIDLWATQYGAVGLLNKFELLGISINKTTLKVAAFGAAFYAATIGVKNFVDANLDALDEIKQLSAVTGESADQIYNLGKVAEVNGSSAQAAQSSIEGLSRVIGEAAAGIGRGAKSFEQYGLSAKKANGEVKTSSEMLGEISDKMKAMGEQEQIAMLAKLGIDSSMIQTLRLGNDELKEQIALASVLTLGVGNAENAKTAAAFKDALTQVSQAFRAIGEYVSLRVAPSIQRLAERFTKWFTENNAFIKATLNGFGKILSFLFELAAAIDNVVEHTIGWKNLIYALGATLLWFSRRMLLAFATNPVTLIITAIAALFLLVDDFITYLEGGETALGEFWKPFKTALLWVKSTWKNFVDNFSVDPIGETLSLITDMLELPFKLGLALVVGLWNLFTGEQLDLDVIETKFAQVTDWIKKPFQSAFDWVKGYYDQYIAPIVDTVKGWFSDSGEKVGTASQNTKAYDTMMFDPSYTSAPQVAAVGAKSQTSNADNRVTNSNNKITITQHIQGTDNPKAVADQSARAINNQLSPVVG

SEQ ID NO: 2999 - DNA, 411 bp, Haemophilus influenzae
atggaaagcaaacaaatcaatattgaaaatgtcgcctatacgatgacgccagctaatgctatgacagcatggactgcactcaaaaatgcaatgaaattattgcaatcagtcgatttatcatcattaggtaacaataaaaaactcggtgcaagcgtattgacgactgtattggcgaatttaggcgacccaagtattaaagagcttgaagatatcgtgcttaaacatacctcatgcgagcaagatggcaaactataccgattatctgaacgttttgatagtcatttcaaccaacaccgtggacatttaatccccgtattaaaagaagggttgatgtatcaattcgctgatttttttatcggtgggggcggattgctgagcaatattcaagccaatctaaaagcgaagaaataa

SEQ ID NO: 3000 - protein, 136 aa, Haemophilus influenzae
MESKQINIENVAYTMTPANAMTAWTALKNAMKLLQSVDLSSLGNNKKLGASVLTTVLANLGDPSIKELEDIVLKHTSCEQDGKLYRLSERFDSHFNQHRGHLIPVLKEGLMYQFADFFIGGGGLLSNIQANLKAKK

SEQ ID NO: 3001 - DNA, 372 bp, Haemophilus influenzae
atggcagttttcgatccaaaacaagttgtcgtgttattagacggcaaagaaatgagtgactgggcagacggctcagatgtgattaatgcgaccaaccaagttgatgcggggcaaatggttattggcgcaaatggcacgggcgtatttatcgcaaaccctgaccaatcaggcaaattaaccctaaaaattaaacaacattctgaggataacgcctatttatctaagttgtttaatcaacaaaaaaccagtattaaaacctatttaccgatgacactcgctatccgcgacttaatcaatttactacacctgcagcttatatgcgtgaaaatgggcacaatgcgacaacatggacgattgtgttcgagaaaatga

SEQ ID NO: 3002 - protein, 123 aa, Haemophilus influenzae
MAVFDPKQVVVLLDGKEMSDWADGSDVINATNQVDAGQMVIGANGTGVFIANPDQSGKLTLKIKQHSEDNAYLSKLFNQQKTSIKTYLPMTLAIRDLINLLHLQLICVKMGTMRQHGRLCSRK

SEQ ID NO: 3003 - DNA, 1509 bp, Haemophilus influenzae
atggcattatctatctcgcagattgtcaatgtgcagttaaatactgtgccaaaatctgccgcgcgtaaatcattcggtatagtggcattgttcacgcctgaggcaggacaagcatttgctgatgcgacgacgcgttatgtttatgtcgaaaatcaacgtgatgtagaacagttattcggcacaaattcagaaacagcaaaagcagcacagccattttttgctcaaagccctcgtgcgaaacaattaattattgcgcgctggcaaaaagcccctgtaaccattgaggcaaccaagaacacattaagcggtgcaaccttgtcggatgatttagatcgttttaaagcggttgtaaatggtcaattttcattaaccattggcactgcaattaaaaaagtcacggggctatcttttgctgacgcctcagatttcaatgcgattgccaccaaaatccaagcaaaattgaccgcactttcctcatctttgtctatttcttacgatggtgtagggcagcgttttatcattacttctaacaatgctggagaagataaagcgaccgaaatccattacgcctttaatggcgacgacaatggcgaatatattggcacattgcttaaattagaaaatggccaagcaagccgaaaagtaggtaaggcatcaatttctttgaaaaaagaaaccgttgcagaagcattatttaacgtagctgaagtgaataatgcgtggtatggctttacctttgccacacagcttacggatagcgaagtggaatctgcagcaaaatacgcgcaagctaataccaaaatgtttggtgcaaatgttattcgtgttgaacaacttgaatggtctgctgataacatctataagaaattatatgatgcaggtttagatcacacattagcgatgttcgataaaaacgatatgtacccagcatcttctgcattggctcgtttattatcaacgaactttgcggcaaataattcaaccttaacgcttaaattcaagcaacaaccaactattacggctgatgaaattacggcaacggagttctctaaggctaaacgcttaggcattaacgtgtacacttattttgatgatgtcgcaatgattgctgaaggcacagtaatgggtggtaaatttgcagatgaaatcgttatcttagactggtttaccgatgcagtgcaaaaagaggtattcgctcgcttgtataaatcaccgaccaaaatcccattaacagacaagggccaagcggtattaattgctgccgtggagaaagtttgtttagagggtgtaaacaatggggcttttgcacctggtcaatggacgggcgatagctttggtaacttgacgacaggtgattatctggaaaagggttactatgtatgggcggcaccaatggatacgctatctgatagcgaccgagagcaacgccgcgcaactccaattcaaaccgcagtgaaattagcaggcgcaattcattctagcgatgtgattgtgaactataaccgataa

SEQ ID NO: 3004 - protein, 502 aa, Haemophilus influenzae
MALSISQIVNVQLNTVPKSAARKSFGIVALFTPEAGQAFADATTRYVYVENQRDVEQLFGTNSETAKAAQPFFAQSPRAKQLIIARWQKAPVTIEATKNTLSGATLSDDLDRFKAVVNGQFSLTIGTAIKKVTGLSFADASDFNAIATKIQAKLTALSSSLSISYDGVGQRFIITSNNAGEDKATEIHYAFNGDDNGEYIGTLLKLENGQASRKVGKASISLKKETVAEALFNVAEVNNAWYGFTFATQLTDSEVESAAKYAQANTKMFGANVIRVEQLEWSADNIYKKLYDAGLDHTLAMFDKNDMYPASSALARLLSTNFAANNSTLTLKFKQQPTITADEITATEFSKAKRLGINVYTYFDDVAMIAEGTVMGGKFADEIVILDWFTDAVQKEVFARLYKSPTKIPLTDKGQAVLIAAVEKVCLEGVNNGAFAPGQWTGDSFGNLTTGDYLEKGYYVWAAPMDTLSDSDREQRRATPIQTAVKLAGAIHSSDVIVNYNR

SEQ ID NO: 3005 - DNA, 441 bp, Haemophilus influenzae
ttgcagttacctaatggtgccgttattggcggttggctccctgaaaatcctttgcctgcttttattaccgtggatttgatgacgagtaatgaaatcgggcaggctacgagagaatttgacggcaaacgtgagcgtatcattcagtcaatgcaaagcaccgtgagtctctcttgtttcggtcgaaattcccttgcgcagtgttacaagctaaaagccattttccaaagttcagcgtttctttcttttctcaaatcaaatcactggggtgtgattcgtttttcagatattcgcaatttaacggctaccgttggggcagattatgaagaacgaggacagtttgatgttgtatttagccatcatcacattgttgatacacctctagatccgatagaaaacgttgaacaacgcacaaaccatttaattcaacaaataggaggatag

SEQ ID NO: 3006 - protein, 146 aa, Haemophilus influenzae
MQLPNGAVIGGWLPENPLPAFITVDLMTSNEIGQATREFDGKRERIIQSMQSTVSLSCFGRNSLAQCYKLKAIFQSSAFLSFLKSNHWGVIRFSDIRNLTATVGADYEERGQFDVVFSHHHIVDTPLDPIENVEQRTNHLIQQIGG

SEQ ID NO: 3007 - DNA, 372 bp, Haemophilus influenzae
atgagtttaattaaccaatatcctcgctttctgaatagcaaatttcgccaaattgtcactgtaaaacatctgcaaggtgagcattcatctgatgggttcggggcgagttatacagatgaaaacgtgactgccattgttatgccgacctctcctaatgatgagttgttattgccagaaggtgagcgttttatcccctcaatcaaaatctacaccattaagccgttaaaaataggtgatttagttatttatgagggggaaacctacaaaataaaaaccgtagcaaattgggggaaatatggataccacaacaatatcggcgttagacacagccaaactgcgaaagtggattcaacaggctttgcagttacctaa

SEQ ID NO: 3008 - protein, 123 aa, Haemophilus influenzae
MSLINQYPRFLNSKFRQIVTVKHLQGEHSSDGFGASYTDENVTAIVMPTSPNDELLLPEGERFIPSIKIYTIKPLKIGDLVIYEGETYKIKTVANWGKYGYHNNIGVRHSQTAKVDSTGFAVT

SEQ ID NO: 3009 - DNA, 312 bp, Haemophilus influenzae
atggcagtacaaatcacggggaatttagcacaagcaaaagggttaattgagcgattaagggctgataaagacaaggcggtttatattggatttcctgctgaatttgatgaaccattagagggggctaagaattttaacctctcctctttggcggctgtgttggaatttggtaatgagcacatcccatcacgccctttcttgcgtcaaaccttgtctaaaaatcaagggaaatacaccgcacttttcacgcaattatttaagcaaggcttgcaaattgagaggatttacgagcaactagcagtagttgcataa

SEQ ID NO: 3010 - protein, 103 aa, Haemophilus influenzae
MAVQITGNLAQAKGLIERLRADKDKAVYIGFPAEFDEPLEGAKNFNLSSLAAVLEFGNEHIPSRPFLRQTLSKNQGKYTALFTQLFKQGLQIERIYEQLAVVA

SEQ ID NO: 3011 - DNA, 300 bp, Haemophilus influenzae
atgaaaaaatcgacctttttttatcggatgcagatggaagtaagtcaatctcgttggggaaaactctaccaacgtggcgtgttggcattgactgctcatctattacgtttgtcactttggacaaccgaaggtggcggtggggcaaatcgaaatctcgctagtgaaagtgctggcgagttatctgttagttatgccgtgccaacactgacaggcaccgatgcggattatcaattaacagcgtatggtcaagagtatttgcgattacgtaaattggttggcattggggtaatggtggcgtaa

SEQ ID NO: 3012 - protein, 99 aa, Haemophilus influenzae
MKKSTFFYRMQMEVSQSRWGKLYQRGVLALTAHLLRLSLWTTEGGGGANRNLASESAGELSVSYAVPTLTGTDADYQLTAYGQEYLRLRKLVGIGVMVA

SEQ ID NO: 3013 - DNA, 915 bp, Haemophilus influenzae
atgtcattattaacttatgtacaaaacggcttaacggctgtgagcaaagaaatttcagaaaccaaatatcctgaaattgtgttcccgcaatttgtttatgtggatcaacaagccgctgtcggcattacagaaaaacttcactatggtgcagatgagcacggttcgcttgatgatggtttaattaccactggcacaagcacattagaccaagtagaagtcggctttacgccaactcgctcttatatcgtacaatgggctaaatcggtaacatgggcaacaccagagcttgaacaaggcaagctgttagggttagcgttagataccgctaaaatcatggcgttaaacaaaaacgcacaacaaaccttacaaaaagttgcttttttaggtcatgcgaaagactctcgattaactggcttgctaaacaataaatctgttgaggtgcacagcatcaaaggcacttccgcaaataccaaagtacaagcgatggattttgacaaatcagtggcatttttcaaagaaatgttccttgcaggcatggaaaaaaccaaacgcattgaagcaccaaatacctttgcaattgattcacttgatttagcgcatttagctttaacgcaacgcaataacaccgatacaaccgcattagagttcttgactaagagcctgtctgctgctgcgggtcgtgacgttacaattaaagccttgccgtcaaactttggtactcgtgtaacaagtggcaaaactcgtgcaatggtttatgtgaacagcaaagagcacgttatctttgatgtgccaatgtcgccaactgtgttagctgctcaacaaaaaggcttattagcttatgaatctggcttacgtatggcgtttggtggcgtaacctttatggagccaaattctgcactctacgtagattactag

SEQ ID NO: 3014 - protein, 304 aa, Haemophilus influenzae
MSLLTYVQNGLTAVSKEISETKYPEIVFPQFVYVDQQAAVGITEKLHYGADEHGSLDDGLITTGTSTLDQVEVGFTPTRSYIVQWAKSVTWATPELEQGKLLGLALDTAKIMALNKNAQQTLQKVAFLGHAKDSRLTGLLNNKSVEVHSIKGTSANTKVQAMDFDKSVAFFKEMFLAGMEKTKRIEAPNTFAIDSLDLAHLALTQRNNTDTTALEFLTKSLSAAAGRDVTIKALPSNFGTRVTSGKTRAMVYVNSKEHVIFDVPMSPTVLAAQQKGLLAYESGLRMAFGGVTFMEPNSALYVDY

SEQ ID NO: 3015 - DNA, 441 bp, Haemophilus influenzae
atgagttatgcttacgaacaagcgcctgcgcgtgcaggcgagttaggcaagggtaatcttgcaaacgcaaaaaccacagcagaaaaagtcacgggcaaagtaaaagctggtgactttgtagcattaaatcccacaggtggtgtgaaagccttatccgctaaaacagatgtattggctggcgtggtgttatcaagcagaattcgcgatgaatggtctgaaggcgaattagtcgatgtgatgcacattggtacaggcgatgcgatttgggtcaatattgcatcagaaaaaacggtatctcgtggtagtaaagtatttgtattaacgacgggtggcgaaggtaaaactggtgcaatccaaggggaaaccgatacaaatgcgattgaaacaagctacaccgtgattgacgttaagggtcaattagcgatgattacaaaattataa

SEQ ID NO: 3016 - protein, 146 aa, Haemophilus influenzae
MSYAYEQAPARAGELGKGNLANAKTTAEKVTGKVKAGDFVALNPTGGVKALSAKTDVLAGVVLSSRIRDEWSEGELVDVMHIGTGDAIWVNIASEKTVSRGSKVFVLTTGGEGKTGAIQGETDTNAIETSYTVIDVKGQLAMITKL

SEQ ID NO: 3017 - DNA, 108 bp, Haemophilus influenzae
gtggcgaaattagcggatgaacgtaaatcgctcggcagtattttgcttggtgatgcggagcctaaagctgcaccaaaaatagatttcaacaaaacttacaacagttag

SEQ ID NO: 3018 - protein, 35 aa, Haemophilus influenzae
MAKLADERKSLGSILLGDAEPKAAPKIDFNKTYNS

SEQ ID NO: 3019 - DNA, 957 bp, Haemophilus influenzae
atgaaatttacagacaaaacaactcaagcagctacacaaagaaccatcactaaagatggttttttagttgtgccagcaatcaccccaaaagttggggtatttgattacctcgctacagaactaggtttaaaagaagacagcattaaaaaggtcgctcgcacagagaaatcgttgtttagcgatgaaacgattaagagttttgaaaatgccacattaactgtaggacaccctaaagatggggtgaatgcgaagaactggaaacagctctctgtcggtgtcgtgcgtaatgttaagcgagtgggcgatgaactcacagccgaggcttggatttatgatgaacaagccattaaaaccgtacaggagcacggtgtggaacaattatcttgtggttatgactgcgatattaagccatccacggtacaagatgcagattttgagatgtcgccgatgatcggtaaccacgtagcgattgtggcaaagggtcgctgcggtggaagtgtaaaacttgccgatgaggataaaaccattatggggaaaaccgcaaaaattctcgatgcgtttttaggtgcgttcggcatcaagttgtcggacgaacagaaaaaacaaattgaggacgaagaaaagtctggtagtaaagaaggtaaagagccaaaaggcgaacaaccaaccgaaccaaaagaaaaacaatctaaacccgaagataaaaaggatgaagaagtgaataaagaagagtttgaaaaacaacttaaagccaaagatgcagaaattcaacagctaaaagatgcacaagcaaaacgtgacgcagaagtaaaacaagctgccgtgttagctgatgctaaaactgcatttaaagaagtcaattttgcggataacgcgactgtgcgtgaaatccaagaaagtgcggtagttgcgcagggcatttttactaaagatgaggcagccaaattatccgattag

SEQ ID NO: 3020 - protein, 318 aa, Haemophilus influenzae
MKFTDKTTQAATQRTITKDGFLVVPAITPKVGVFDYLATELGLKEDSIKKVARTEKSLFSDETIKSFENATLTVGHPKDGVNAKNWKQLSVGVVRNVKRVGDELTAEAWIYDEQAIKTVQEHGVEQLSCGYDCDIKPSTVQDADFEMSPMIGNHVAIVAKGRCGGSVKLADEDKTIMGKTAKILDAFLGAFGIKLSDEQKKQIEDEEKSGSKEGKEPKGEQPTEPKEKQSKPEDKKDEEVNKEEFEKQLKAKDAEIQQLKDAQAKRDAEVKQAAVLADAKTAFKEVNFADNATVREIQESAVVAQGIFTKDEAAKLSD

SEQ ID NO: 3021 - DNA, 1560 bp, Haemophilus influenzae
atgctgatgaacttgccggaaattttgaagaaccagagggcgaaagcacgcaagttcaagccagtgaagatgagcaagagaacggagctttggtatagacaacagcttaagcagttcgtcaaaacaatgaccgatgatgtagaaatagccatgcaacaaccgcaaggctctttttttatggatgatgcgaaagggttccaagcgattagtgcgaaagcgttgatgaaagtattagaaaagtacgaaaaatctgaccgcacttctcaagctgaaaatatcgccaatggcttcgttggtcgtggtgatgcacaaaaccatgctgaagtatcaaccaatttgaaaaaccaaactggtatcgatttatccgcctatttacgcaatagtccaaatattgctgaaagagtgaatgcattgaccgctggtaatatccagttaattaagtctattcgcgcacaatatcttgataaggtgcaaaatgccgtcatgcaagcgatggttcggggttctttaaataaagaccttgcagcacaaataaaagacttgggtaaaacaaccgaaaaacgagcgatgtttattgcgcgagaccagtcctcaaaattaaatgccgccttaacgcaagcgagacatgaagatgtaggtataaaaaaatatatgtggtcagcatcgcttgatgagcgtgtacgcgaaagccatgcggaaaaagatgggcagatttttgaatattcaaatccccctgctgatactggtcatcctgggcatgattttaattgtcggtgtgttcagattccagtgcttgataataacgagcagatagtgaaaaatagcccaatagttagccaacaggaaaaacaacaaatgcgctcagaatggtctgatgatttccctgatactatcattgataggaaattaggagatgcaacatcacatccgctatatgaaaatgctaaaaagggtagtattgaagatgcttatcaacttgctaaagatttagttacagatgatgcggtaaataaattgaagcaattggttggcaataaaaatgcaattctaattcctgttcatgcagaagaagccgttggtcaaaatatgattcctgtagctattgctactgtattatctaaaaaactccatattcctgttgatttatcaattgttcaagcaacaaaagtatctagaactgggggagatggatggcatcgattggtttattctccagcttttgatggcatagttccaaaagataaatatgctattattttagatgacacacaaacacaaggcggtacattggctagtctaaaaggctatattgaggagaataaaggaaaagttattgcatcttatgctttaaccggcaaacaatattctgtacaattaaggctatctaaacacacattagcagaattacggagtaaatatggcgaacttgaaagttggtggaaaaaagaatttggctacgacttctcgcggtttacagaatgggaagcaagattcatcattaattcacgtaagacacctgacgaagtcagaaatacaatccttgcgagaaagcaagcgtaa

SEQ ID NO: 3022 - protein, 519 aa, Haemophilus influenzae
MLMNLPEILKNQRAKARKFKPVKMSKRTELWYRQQLKQFVKTMTDDVEIAMQQPQGSFFMDDAKGFQAISAKALMKVLEKYEKSDRTSQAENIANGFVGRGDAQNHAEVSTNLKNQTGIDLSAYLRNSPNIAERVNALTAGNIQLIKSIRAQYLDKVQNAVMQAMVRGSLNKDLAAQIKDLGKTTEKRAMFIARDQSSKLNAALTQARHEDVGIKKYMWSASLDERVRESHAEKDGQIFEYSNPPADTGHPGHDFNCRCVQIPVLDNNEQIVKNSPIVSQQEKQQMRSEWSDDFPDTIIDRKLGDATSHPLYENAKKGSIEDAYQLAKDLVTDDAVNKLKQLVGNKNAILIPVHAEEAVGQNMIPVAIATVLSKKLHIPVDLSIVQATKVSRTGGDGWHRLVYSPAFDGIVPKDKYAIILDDTQTQGGTLASLKGYIEENKGKVIASYALTGKQYSVQLRLSKHTLAELRSKYGELESWWKKEFGYDFSRFTEWEARFIINSRKTPDEVRNTILARKQA

SEQ ID NO: 3023 - DNA, 1332 bp, Haemophilus influenzae
atgaatattttagatggcatcaaatcacttgcgctaaagttaggtagcaaacaagaccagacatattatgctcgtgggcttagtttaaccgatgacttaatgcaaatcgaagcattatggcgtgataactggattgcaaataaggtttgtattaaacgctcggaagatatggtgcgtaactggcgtgatattttctcgaatgacttaaaatctgaacagctagacgagttcactaagctcgagcgtagattaaaactgcgtgagacattaactaaagcgttgcaatggtctagtttgtatggggcagtgggtttattggttgttactgacacaattaacatcacttcgccattgcagcctacagaacgattaaagcggttgattatcttacctaaatggaaaatctcacccacagggcaacgagatgacgatgtattttcgccaaactttggtcgatacagtgaatataccattactggcggcacacaatctgtttcagtgcatcattcacgcttattaatcatcaatgccaatgatgcgccattatctgataacgatatttggggtgtatcagaccttgaaaagattattgatgtacttaaacgctttgatagtgcctcagcgaatgtcggcgaccttatttttgaaagtaaaatcgatattttcaaaattgcagggttatctgacaagatttcagctggcttagaaaatgatgtggctcacgttatttcagcggtgcagtcgattaaatcagcaaccaatagtctgttgcttgatgcggaaaatgagtacgaccgaaaagagctatccttcggtgggttaaaagatttactgacagagtttcgcaatgcggtggcaggtgcggcagatatgccagtcaccattttgtttgggcaatctgtttcgggattggcaagtggagatgaggatattcaaaactatcacgaatctattcatcgattacaagagacaagattgcgtcctgtgcttgaagtgcttgatacactgctatgcaatgaattatttggtgggcaacctgatgactggtggtttgaatttttaccattgacggtggttaaacaagagcaacaagttaatatgcttaatacctttgctacagcggcaaatacgttaattcaaaatggcgtagtaaatgaatatcaagtggcaaacgaactccgagaaagtggtttatttgccaatatctctgctgatgacattgaggaaatgaaaaatgctgatgaacttgccggaaattttgaagaaccagagggcgaaagcacgcaagttcaagccagtgaagatgagcaagagaacggagctttggtatag

SEQ ID NO: 3024 - protein, 443 aa, Haemophilus influenzae
MNILDGIKSLALKLGSKQDQTYYARGLSLTDDLMQIEALWRDNWIANKVCIKRSEDMVRNWRDIFSNDLKSEQLDEFTKLERRLKLRETLTKALQWSSLYGAVGLLVVTDTINITSPLQPTERLKRLIILPKWKISPTGQRDDDVFSPNFGRYSEYTITGGTQSVSVHHSRLLIINANDAPLSDNDIWGVSDLEKIIDVLKRFDSASANVGDLIFESKIDIFKIAGLSDKISAGLENDVAHVISAVQSIKSATNSLLLDAENEYDRKELSFGGLKDLLTEFRNAVAGAADMPVTILFGQSVSGLASGDEDIQNYHESIHRLQETRLRPVLEVLDTLLCNELFGGQPDDWWFEFLPLTVVKQEQQVNMLNTFATAANTLIQNGVVNEYQVANELRESGLFANISADDIEEMKNADELAGNFEEPEGESTQVQASEDEQENGALV

SEQ ID NO: 3025 - DNA, 1344 bp, Haemophilus influenzae
atgagccagcttaatattcaatttcctacgaaattccgaccgctctttgaatctatttggcggtttattattttctacggtgggcgaggttcaggtaaaagttttagtatcgctagagcattagtattgcgagcctatcaatcgcctgttcgagttttgtgttgtcgtgaaattcagaaatcgatttctgattctgtgattcagatgttggcagaccaagttgaaatgttaggtctgcaagattttttcgatgttcagaaaacgcaaattatcgagcaaaacggttcacgcttcacgtttgcggggctgaaaactaacattacttcgattaagtcgatgacgggcattgatgtagtttgggtagaagaaggcgagaatgtttcaaaagaaagttgggatatattgattccaacaattcgtgaagacggttcgcagattattgtgagctttaacccgaagaatattcttgatgatacctatcagcgttttgtgattcatccgcctgagcggtgtaaatcggtcttagtgaattggcaagacaacccatattttccgaaagaattaatggaagatatggagcagatgcgtgagcgtgattacgagctttatcgtcacgtttatgagggcgagcctgtggctgattccgatttagccattattaagcctgtatggattgaatctgcggtggatgcgcatctcaaacttggttttactactaaaggaatgaagaaagttggctttgatgtggctgatgagggtgcggatagtaacgctaatgcatttgttcacggttctgtggtgcttgacattgaagtttggaagaatggctatgtaattgattccgccaaccgaacaaatcaaagtgcggtcaaatttaaagctgatttgattatattcgatagtattggtgtgggggcgggagtaaaagctcactttaaacgcttgccaaaatctttacaagtggaaggatttaatgctggtggtgcagttgcttatcccgagcgtgaatatatcaaaggcaaaaagaatcaagatatgttttcgaacattaaaacccaatcttggtgggcgttgcgagatagattctataaaacctatcgagcagtaaagtatggggatgtttatcctgacgatgaactgataagcctatcgagcaaaatcaaagagcttgagtatttgaaagcagaattatcacgtcctcgtgttgattatgacaataacgggcgggtaaaggttgaaagcaaaaaggatatgaaaaaacgtggcataccttctccaaatatggcggatgctttagtcatgtgctacgccccgacaaaacctaaatcactactggatttataa

SEQ ID NO: 3026 - protein, 447 aa, Haemophilus influenzae
MSQLNIQFPTKFRPLFESIWRFIIFYGGRGSGKSFSIARALVLRAYQSPVRVLCCREIQKSISDSVIQMLADQVEMLGLQDFFDVQKTQIIEQNGSRFTFAGLKTNITSIKSMTGIDVVWVEEGENVSKESWDILIPTIREDGSQIIVSFNPKNILDDTYQRFVIHPPERCKSVLVNWQDNPYFPKELMEDMEQMRERDYELYRHVYEGEPVADSDLAIIKPVWIESAVDAHLKLGFTTKGMKKVGFDVADEGADSNANAFVHGSVVLDIEVWKNGYVIDSANRTNQSAVKFKADLIIFDSIGVGAGVKAHFKRLPKSLQVEGFNAGGAVAYPEREYIKGKKNQDMFSNIKTQSWWALRDRFYKTYRAVKYGDVYPDDELISLSSKIKELEYLKAELSRPRVDYDNNGRVKVESKKDMKKRGIPSPNMADALVMCYAPTKPKSLLDL

SEQ ID NO: 3027 - DNA, 513 bp, Haemophilus influenzae
atgtcagacgtgaaaggaaaatctacgtctggtcgtggattaacacctaaacaagaaaaattttgccagctttatattgagctggggaatgccagtgaagcatatcggcagagttatgattgccaagatatgaagtccgaaagtataaaccgattagctaaaaaagaattagataagatcaagattagatcaagggttgatgtgcttcaacaagagcaccgacaacgccataatcttaccctagataatatcattgcggacttgcaagagtatcgtgatatttgtatgggaagaaagccacttactattaccactgtggtaaaaaatgctcaagaaggaacggcacaaagcgttaataccgaatgtttcgtttttgaaccgacaggtgcaaataaagcccttgaattgcttgggaagcatttagggatgtttaccaataaagttgatgtaacaaccgatggcaagccattacctactgtgattaatgtgacatttagcgatgagccagcttaa

SEQ ID NO: 3028 - protein, 170 aa, Haemophilus influenzae
MSDVKGKSTSGRGLTPKQEKFCQLYIELGNASEAYRQSYDCQDMKSESINRLAKKELDKIKIRSRVDVLQQEHRQRHNLTLDNIIADLQEYRDICMGRKPLTITTVVKNAQEGTAQSVNTECFVFEPTGANKALELLGKHLGMFTNKVDVTTDGKPLPTVINVTFSDEPA

SEQ ID NO: 3029 - DNA, 252 bp, Haemophilus influenzae
atgaaagaactcatctaccaaccaaaagcattaaagcaattaagaaaaatcccgagcaaagcccacattattgagaaatgcgaaatgctcaaaaattttcctgattgcactaacattaaggcattaacaaaccatacttacgaatatcgttaccgtgttggtgattatcgtgttttctttaatatcgttggcaatacgatgaatatcgtatctattgaagaggttaaaaaaagagatgaacgcacttactaa

SEQ ID NO: 3030 - protein, 83 aa, Haemophilus influenzae
MKELIYQPKALKQLRKIPSKAHIIEKCEMLKNFPDCTNIKALTNHTYEYRYRVGDYRVFFNIVGNTMNIVSIEEVKKRDERTY

SEQ ID NO: 3031 - DNA, 348 bp, Haemophilus influenzae
atgaacgcacttactaatatccaatatatcaataatgagcaaggcgtacctgcttttgctgttatgccaattgctacgcttaactggctaaaagaaaaagctaatttttcagaccctattgaaacaggtatccctgaatctgtcgccaaattagctttattgaacgattattctgcattgcgtgcttggcgtgaacacttaggtttaacacaagcggaagtggcaagccgtttaggcatttctcaagctgcttattcacaacacgaaaattcacagaccttgcgtaaaagcactcgcattaaaatagcgacagcacttggcattaatcccgctcaattagatttttaa

SEQ ID NO: 3032 - protein, 115 aa, Haemophilus influenzae
MNALTNIQYINNEQGVPAFAVMPIATLNWLKEKANFSDPIETGIPESVAKLALLNDYSALRAWREHLGLTQAEVASRLGISQAAYSQHENSQTLRKSTRIKIATALGINPAQLDF

SEQ ID NO: 3033 - DNA, 324 bp, Haemophilus influenzae
atgactaagtacatttacatggcgttagcgggtgttgtcgtggttttgattggtgcattgcgttaccaatctagcgttatagatgagttggaaataacgacaaaacaacaagaaaatactatccagcaacaagaagatgctaacaaatcattaagtcttgcgttacaacaagagcgttatgccgttattgagcaacaagagcgtaataatgaaatagaaaggatggcaatagaacatgctgaatcagttaaaacaatcattaagacacaaccttgcgctcacactcgtctgcctcagtctgttcttgaccgcttgcacaaataa

SEQ ID NO: 3034 - protein, 107 aa, Haemophilus influenzae
MTKYIYMALAGVVVVLIGALRYQSSVIDELEITTKQQENTIQQQEDANKSLSLALQQERYAVIEQQERNNEIERMAIEHAESVKTIIKTQPCAHTRLPQSVLDRLHK

SEQ ID NO: 3035 - DNA, 501 bp, Haemophilus influenzae
gtgaataagatgcagcaagcgatgtttttagctcaatgtggacatgaaagtggcggatttacaagatttaaagaaaatttaaattattcttggcttgggctttctaaaactttccgtaaatatttcccagaccctcttacagcgaagaaatatgagcgcaaacctgaacttattgccaatcgtgtttatgctaatcgtttgggtaatggcgatgagaaaagtggagatggttggaagtatcgtggtcgtggactgattcagattacaggtaaggataattatgccgcatttagaaaatggttaggtagagatattgagccagacgatgtggcagggaatttagatttatctgttaaaactgcagtgtggtattggaaatgctatgagttggctgagcttaattctgtcgaaaaagtcacgcgaagaattaatggtggactaaatggcattgatgagcgttgcaagctctatcgagcattaatggtaacggataatgactaa

SEQ ID NO: 3036 - protein, 166 aa, Haemophilus influenzae
MNKMQQAMFLAQCGHESGGFTRFKENLNYSWLGLSKTFRKYFPDPLTAKKYERKPELIANRVYANRLGNGDEKSGDGWKYRGRGLIQITGKDNYAAFRKWLGRDIEPDDVAGNLDLSVKTAVWYWKCYELAELNSVEKVTRRINGGLNGIDERCKLYRALMVTDND

SEQ ID NO: 3037 - DNA, 357 bp, Haemophilus influenzae
atgccaattaaagagcctgatgtgtgggcgttaatatggtcttggttgcaaacaaatcttagttctagctcagcacagagtgctttttgggcgttatttatttctcttttaagatttgggtttatgcgtaaaaagccagctattcgttatgttttaattgatgcggctatgtgtgcctctattgcgggtgttgcggtgccaatttgtacgcatttatttgggcatacagaatattcttcatttctcggtacgatgattggttttgttggtactgaaaaaattcgcgagtttttatttaaattcattaatcggagaattgaaaaagatgacaatgatgatttccgaagtgacatttaa

SEQ ID NO: 3038 - protein, 118 aa, Haemophilus influenzae
MPIKEPDVWALIWSWLQTNLSSSSAQSAFWALFISLLRFGFMRKKPAIRYVLIDAAMCASIAGVAVPICTHLFGHTEYSSFLGTMIGFVGTEKIREFLFKFINRRIEKDDNDDFRSDI

SEQ ID NO: 3039 - DNA, 321 bp, Haemophilus influenzae
ttgtcagaacctgaaaagaaatttacccgtgaatttacagaacatgaccttcaacagcttgtttgggcatggtttgctttattgcgtggcacggaactttgccaagtacttcacccggcattaaaacaaattggttcgcactacgctgcatccgttcatgacattgcttacgaatatcgaagtaatctccgtcaagcccataacgtattgacacgcattacagagcaatttgaatgcgagcaaggtaataactggcgcgtattaaaatatcttcgagcctacaaccctaaagcaacaggctttcagttagaaattctataa

SEQ ID NO: 3040 - protein, 106 aa, Haemophilus influenzae
MSEPEKKFTREFTEHDLQQLVWAWFALLRGTELCQVLHPALKQIGSHYAASVHDIAYEYRSNLRQAHNVLTRITEQFECEQGNNWRVLKYLRAYNPKATGFQLEIL

SEQ ID NO: 3041 - DNA, 204 bp, Haemophilus influenzae
atggaaccaattaaactttcgcagaaagccgaagaggaaattgtgaatgcggcaagaatggcagcgttatccaatttgactgaaaaaagccaaaatttaattacgcttgaggatatcgcaatatattttgggcgacactatcaaaccgttgccaagattatttcaaaactgcctaattttcccaaccccgttacggtcgattaa

SEQ ID NO: 3042 - protein, 67 aa, Haemophilus influenzae
MEPIKLSQKAEEEIVNAARMAALSNLTEKSQNLITLEDIAIYFGRHYQTVAKIISKLPNFPNPVTVD

SEQ ID NO: 3043 - DNA, 159 bp, Haemophilus influenzae
ttgcattttcacgacacacggcgtgaggcattaactagactatctaaaaaagtagatgtgatgacattagccaaaatatctgggcacagagatatttcgattttacaaaatgtctattatgcccctgatatggcggaggtggcggaattacttgattag

SEQ ID NO: 3044 - protein, 52 aa, Haemophilus influenzae
MHFHDTRREALTRLSKKVDVMTLAKISGHRDISILQNVYYAPDMAEVAELLD

SEQ ID NO: 3045 - DNA, 93 bp, Haemophilus influenzae
atggcagctgaaaaattaacaaaaaaacgtttagctcaaattttaattatgttgtgcattttaattattgcatttgtttggcgatatttttag

SEQ ID NO: 3046 - protein, 30 aa, Haemophilus influenzae
MAAEKLTKKRLAQILIMLCILIIAFVWRYF

SEQ ID NO: 3047 - DNA, 774 bp, Haemophilus influenzae
atgaaaaatttcgttgcaggagctcaatcagggcgcaaaattcaatcaggcggttgtgcgattcattgtcaggattgcagtattagtcagctttgtattccttttaccttaaatgaacaagaattagatcagcttgataatatcatagagagaaaaaaaccgattcaaaagtctcaagtattgtttaaagcaggagattctctcaattcaatttatgctattcgttcaggcacaataaaaagctatacgattagtgaatctggcgaagaacaaattacttcatttcatttgcccggtgacctagttggttttgatgccattactcaaatgcaacaccctagttttgcgcaagctctagaaacggctatggtatgtgaaattccttttgatattttagatgatttggcaggaaaaatgccaaaactacgccagcaaattttacgtttgatgagcagtgaaattaaaagtgatcaagagatgattttattgctatctaaaatgaatgcagaagaacgtttggctgcttttattcataatctttctaaacgctattctgctcgaggtttttcagcaaaagaatttcgtttaacaatgacacgtggcgatattggtaattatctaggtttaacagtagaaaccatcagccgcttattaggtcgctttcaaaaactcggcgtgattagcgtacaaggcaaatatattacaatcaatgatttaaatggtttaattgaattaactggtacgaataaaacaaaaattacattagttaaataa

SEQ ID NO: 3048 - protein, 257 aa, Haemophilus influenzae
MKNFVAGAQSGRKIQSGGCAIHCQDCSISQLCIPFTLNEQELDQLDNIIERKKPIQKSQVLFKAGDSLNSIYAIRSGTIKSYTISESGEEQITSFHLPGDLVGFDAITQMQHPSFAQALETAMVCEIPFDILDDLAGKMPKLRQQILRLMSSEIKSDQEMILLLSKMNAEERLAAFIHNLSKRYSARGFSAKEFRLTMTRGDIGNYLGLTVETISRLLGRFQKLGVISVQGKYITINDLNGLIELTGTNKTKITLVK

SEQ ID NO: 3049 - DNA, 879 bp, Haemophilus influenzae
atgaaatttaaaaatattctcgttgtacttaatcccagtaatgaaaaacagtacgccctagctcgtgcagtgcgtttagttgaagaacaaaaaaatgaaactaaggtaaaaatcaccgcacttttatcagtctatgatttatcttatgaaatgtcagctttactttcttctgaagaacgttcagaaatgcatcaacaagtaatagaaaaacaccgtcacgctgttcaatattacttagataaatatgcaaatccagaaattgaattacaatctcatattgtgtggaatagcaatgaagctgatgcaattaacgaagaagtagaaaataataattacgatctagtcgtaaaatataccaaagacgaagaaaaacttacgtctctaatctttactcccattgattggcaacttcttcgtaaatgccctattcctgtcttaatggttcgtgatggcgattggaaacatcaacgccgtattcttgtggctgttaatgtatctggagaacaagaatatcaagatgaatttaatcaagagctggtagaaactggtatttcactcgcggaaaatctaaatcgtggtaatgtccatttggtggcagcctacccttccgcgccaattaatatggcgattgatttgcctgaatttaatacttcaggttatgaaaacggtattcgaggtcagcatctcattaatatgaaagcgttacgtcagaagtttgggattgatgaagatcatactcacgtacgcgaaggtttcccagaggaagttattcctgaagtggcgaaagaaattgaagctgaattagtgattttaggcacagtgggacgcacaggtttatctgccgccattattaggcaatactgcagaacatgtaattag

SEQ ID NO: 3050 - protein, 292 aa, Haemophilus influenzae
MKFKNILVVLNPSNEKQYALARAVRLVEEQKNETKVKITALLSVYDLSYEMSALLSSEERSEMHQQVIEKHRHAVQYYLDKYANPEIELQSHIVWNSNEADAINEEVENNNYDLVVKYTKDEEKLTSLIFTPIDWQLLRKCPIPVLMVRDGDWKHQRRILVAVNVSGEQEYQDEFNQELVETGISLAENLNRGNVHLVAAYPSAPINMAIDLPEFNTSGYENGIRGQHLINMKALRQKFGIDEDHTHVREGFPEEVIPEVAKEIEAELVILGTVGRTGLSAAIIRQYCRTCN

SEQ ID NO: 3051 - DNA, 171 bp, Haemophilus influenzae
gtgaatatcattccattaattgatggtatttggaaaattaaagttattcataaaacaccatttgcagatcaacaaacttgtcagcaatctgcaagctatagcacattaattttaccggttggtaaaggattggctaaactcccaccaaaaccagaacaccatcatcattaa

SEQ ID NO: 3052 - protein, 56 aa, Haemophilus influenzae
MNIIPLIDGIWKIKVIHKTPFADQQTCQQSASYSTLILPVGKGLAKLPPKPEHHHH

SEQ ID NO: 3053 - DNA, 639 bp, Haemophilus influenzae
atgaaaaaaattgccgtccttatttctggtcaaggaacaaatttacaaactattattgatgcctgccatttaggcgatattcccgccaaaattgtttgtgtggtaagtaacaaagctgatgcttacggcttagttcgagccaaacaagcacagattccgcaagcggtctttcttcgcaaaaattttgccaataacctcgaaatggacgacgccattggcgattatttgcaaagcctagccgtagatttgatcgttcttgctggttatatgaaaattcttaccccaaaatttactcaacgttttgctgggaaaattttaaatatccatccttctcttcttcctaaatacgcaggcttaaacacctaccaacgtgcgattgaagcaggcgacaatgaacacggcacaaccgttcattttgtcaatgaagaagtagatggtggtgcgattgtcttacaagcaaaagtgccaatcttccccgaagatagcatagaagaagtggaagctagaacccgtgagcaagaatatcaaatttatccgcttgtgattaaatggtttaccgaagggcggttaagacttaaagataatttggcatatttagatgggaaacccttgccaaaatctggatatgcagatgaataa

SEQ ID NO: 3054 - protein, 212 aa, Haemophilus influenzae
MKKIAVLISGQGTNLQTIIDACHLGDIPAKIVCVVSNKADAYGLVRAKQAQIPQAVFLRKNFANNLEMDDAIGDYLQSLAVDLIVLAGYMKILTPKFTQRFAGKILNIHPSLLPKYAGLNTYQRAIEAGDNEHGTTVHFVNEEVDGGAIVLQAKVPIFPEDSIEEVEARTREQEYQIYPLVIKWFTEGRLRLKDNLAYLDGKPLPKSGYADE

SEQ ID NO: 3055 - DNA, 1035 bp, Haemophilus influenzae
gtgagcaacacacaactgagctataaagatgctggcgttgatattcacgctggaaatgaattagtcgaacgtatcaaaggcgatgtaaaacgcactcgccgctctgaagtcatgagcggattgggtggtttcggcgcattatgtgctttaccaaccaaatataaagagccgattttagtttctggtacagatggcgttggcacaaaattacgccttgcgattgacttgaaaaaacacgataccattggtcaagatttagtggcaatgtgtgtaaacgacttaatcgtacaaggggcagaaccgcttttcttcttagattactatgctacagggaaattagacgttgatgtggcagcaagtgtgatcaaaggtattgcagacggttgcgaaatgtctggctgtgcgttagtcggtggcgaaaccgctgaaatgccaggaatgtaccacgaaggcgactatgatttggcaggtttctgcgtaggcgtggtagaaaaatcagagattattgacggcacagcagtgaaaacaggcgacacgcttatcgcactcggctcaagcggtgcacactcaaacggttattcgttaattcgcaaagtgcttgaagtaagtggtgcaaatccaacggatttattagaaggtaaaccacttagcgaacactttttagcaccaaccaaaatctatgtaaaatcgattttacagttgatcaagcagaccgaagttcacgccattgctcacttaacaggtggtggtttctgggaaaatatcccgcgtgtattacctgacaatactaaagcagtgattgatgaatcaagctggcaatggcctgcgatcttcaactggttacaagaaaaaggcaacatcagccgttatgaaatgtatcgcacctttaactgtggcgtaggtatggtaatttcattaccagaaaaagaggttgaaaccgctcttgcattgcttgaacaagcgggcgaaaaagcgtgggttatcggcaaaattgaacatcttggcgaaggcgaagcacaggttgagattcaataa

SEQ ID NO: 3056 - protein, 344 aa, Haemophilus influenzae
MSNTQLSYKDAGVDIHAGNELVERIKGDVKRTRRSEVMSGLGGFGALCALPTKYKEPILVSGTDGVGTKLRLAIDLKKHDTIGQDLVAMCVNDLIVQGAEPLFFLDYYATGKLDVDVAASVIKGIADGCEMSGCALVGGETAEMPGMYHEGDYDLAGFCVGVVEKSEIIDGTAVKTGDTLIALGSSGAHSNGYSLIRKVLEVSGANPTDLLEGKPLSEHFLAPTKIYVKSILQLIKQTEVHAIAHLTGGGFWENIPRVLPDNTKAVIDESSWQWPAIFNWLQEKGNISRYEMYRTFNCGVGMVISLPEKEVETALALLEQAGEKAWVIGKIEHLGEGEAQVEIQ

SEQ ID NO: 3057 - DNA, 267 bp, Haemophilus influenzae
atgaaaactactactgcattagttacaggtgcaaccgcaggctttggcttggcgatctgtaaaaaattaatcgaaacaggctataaagtgattggcacgggtagacgtgcagatcgattggcagaaatccattcacaattgggcaataattttctaccgcttgcctttgatattcgtgatgaacaagccacaattaacgctctaaatacccttcctgaaagttggcaagcggtcgatttattagtgaataacaacctgaacacgtga

SEQ ID NO: 3058 - protein, 88 aa, Haemophilus influenzae
MKTTTALVTGATAGFGLAICKKLIETGYKVIGTGRRADRLAEIHSQLGNNFLPLAFDIRDEQATINALNTLPESWQAVDLLVNNNLNT

SEQ ID NO: 3059 - DNA, 1197 bp, Haemophilus influenzae
atgtcagacacacttcttaacccttattttggcgaatttggcggaatgtatgtacccgaaattttagtgcctgttttaaagcaattagaacaagcctttgtggaggctcaaaatgatcctacattccaagcagaatttgttgatttactcaaaaattatgcgggcagaccgaccgcacttactctttgtcgtaacttaactaaaggtacaaaaactaaactttatcttaaacgtgaagatttattacacggtggtgcacacaaaaccaaccaggtgttagggcaaattttattggctaaacgtatgggcaaaacgcgtattattgccgaaacaggtgcgggtcagcacggtgttgcgaccgccctagcttgtgctatgttagatatgccgtgtcgtgtttatatgggtgcaaaagatgttgagcgtcaatcaccaaacgtgttccgtatgcgtttaatgggggctgaagtaattcctgtacaaaaaggctcttgttctttaaaagatgcctgttgtgaagcgatgcgtgattggtcagcaaactatgaaaccacccattatttacttggaaccgctgcaggccctcaccctttcccgacgattgtgagagaatttcaaaaaatgattggcgaagaaaccaaacgtcaaattctcgaacgggaaggtcgtttacctgatgctgtcattgctgctgttggcggtggttcgaatgcaattggtatgtttgctgattttattgatgaatcaaatgtgcgtttaattggtgttgagcctgcgggtaaaggtattgaaacgggcgaacacggtgcaccgctcaagcacggcacaacaggcatctacttcggaatgaaatcgccaattatgcaagataaagatggacaaattgaagaatcctactccatttctgcagggttagattttccctctgtcgggccgcaacatgcttatttaaatgagattggtcgtgctgattatgtatcgattaccgatgaagaagccctcaacgcattccaagaattggcaaaacatgaaggcattatccctgcattagaaagctcacacgccttggcttatgccttgaaattgattaaacaaaatcctgaaaaagaacaacttttagtggttaatctttcaggacgaggcgataaagatatttttaccgttgataaaattttgacagaaaaaggaatgaaataa

SEQ ID NO: 3060 - protein, 398 aa, Haemophilus influenzae
MSDTLLNPYFGEFGGMYVPEILVPVLKQLEQAFVEAQNDPTFQAEFVDLLKNYAGRPTALTLCRNLTKGTKTKLYLKREDLLHGGAHKTNQVLGQILLAKRMGKTRIIAETGAGQHGVATALACAMLDMPCRVYMGAKDVERQSPNVFRMRLMGAEVIPVQKGSCSLKDACCEAMRDWSANYETTHYLLGTAAGPHPFPTIVREFQKMIGEETKRQILEREGRLPDAVIAAVGGGSNAIGMFADFIDESNVRLIGVEPAGKGIETGEHGAPLKHGTTGIYFGMKSPIMQDKDGQIEESYSISAGLDFPSVGPQHAYLNEIGRADYVSITDEEALNAFQELAKHEGIIPALESSHALAYALKLIKQNPEKEQLLVVNLSGRGDKDIFTVDKILTEKGMK

SEQ ID NO: 3061 - DNA, 807 bp, Haemophilus influenzae
atgagccgttttgaaacgcaatttgcgacacttaacgcaaaaaatgaaggggctttcgtgccgttcgttaccctttgcgaccctactttcgaccactcttttgagatcatttgcacacttgtggataacggtgcagatgctttagaactcggttttcctttttccgatccgctactcgatggcccagttattcaagccgcgaataatcgtgctttaactgcaggtcatagcagtgaagatagctttaaactattggaaaaagtgcggtcaaaatatccagagattccgattagtttattactttgtgccaatttaatttttgctaaaggtttagatgctttttatcaacgttgtgcagaagttggtgttgatgctgtacttgtagcagatattccgttactggcaaaaggagattatgtacaaacagctaaaaaacacggtattcaacccgtctttatttgccctcctaatgcagatgaggaaactattcaaggcgtagcgaaaaatagcgaaggctatacctatttagtctcacgcgcaggcgtaaccagtgctgaaaatcaagctcacgcagcaaatttagatacccttgtagaacagcttaaagcccacaatgccccaccaattttacaaggcttcggcattgctcaaccagagcaagtgaaagaagcattgtctttgggcgctgcgggtgcaatttcaggttctgcaacggtgaaaattattgagcgaaatttagataatcacgagcaatgtttaactgaattagctgaatttgttcaaacgatgaaagctgcaacaaaataa

SEQ ID NO: 3062 - protein, 268 aa, Haemophilus influenzae
MSRFETQFATLNAKNEGAFVPFVTLCDPTFDHSFEIICTLVDNGADALELGFPFSDPLLDGPVIQAANNRALTAGHSSEDSFKLLEKVRSKYPEIPISLLLCANLIFAKGLDAFYQRCAEVGVDAVLVADIPLLAKGDYVQTAKKHGIQPVFICPPNADEETIQGVAKNSEGYTYLVSRAGVTSAENQAHAANLDTLVEQLKAHNAPPILQGFGIAQPEQVKEALSLGAAGAISGSATVKIIERNLDNHEQCLTELAEFVQTMKAATK

SEQ ID NO: 3063 - DNA, 954 bp, Haemophilus influenzae
atggacgcaaccttaaatattgcgatagcagcagaatttgaattaagtgaaaaaattgtagagtgtttagaacaaagtacgcttgaaattagtaacatttctattgttgaaataacaccttttgaagaagagcaaaatattcgttttcgcaataaaggcgttgaacaactttcgccaaatgaagtagagtgggctgattttaattatgtcttttttgcaggaaaacttgatcaagttgcccatattgcacaagcagcagagcagggctgtattgtcattgatatgttaggcgtttgtagtgcactttcggatgtgcctgttgttgttccaacggtaaatgaatcacaattacttgaattgagacaacgtaacattgttagcttgcctgatccacaagtaagccaacttgctttaatccttgccccgattttacaagaaacgaatcttaatcaagtgtttgtcacctctttattgccggcttcttatacggatgcagaaaccgtgacgaaacttgcgggacaaacagcccgtttattaaatggtattccattggatgaagaagaaacgcgcttagcctttgatgtttatccgtatcaagcacctaatttatcgaatcaattacaacgaatttttccgcaattagagcgtgctacatttcatgcaatccaagtacctgtattttatggattggcacaaaaagtcaccgcactttcagattatgatttcgactatcagcctcaaaatagcgagcttgtcgctttagaagaaaccttaattacgcctgtgcttaatggagaacaagaaaatggcgaagaatcagtaaaacttcatttaagtcaaataagtgcggtagaaaatggcgtagaattttggtctgtggcagatgaacaacgctttaatctcgccttactttcagtgaaattgttggaaggaatttatcagcaaggttattaa

SEQ ID NO: 3064 - protein, 317 aa, Haemophilus influenzae
MDATLNIAIAAEFELSEKIVECLEQSTLEISNISIVEITPFEEEQNIRFRNKGVEQLSPNEVEWADFNYVFFAGKLDQVAHIAQAAEQGCIVIDMLGVCSALSDVPVVVPTVNESQLLELRQRNIVSLPDPQVSQLALILAPILQETNLNQVFVTSLLPASYTDAETVTKLAGQTARLLNGIPLDEEETRLAFDVYPYQAPNLSNQLQRIFPQLERATFHAIQVPVFYGLAQKVTALSDYDFDYQPQNSELVALEETLITPVLNGEQENGEESVKLHLSQISAVENGVEFWSVADEQRFNLALLSVKLLEGIYQQGY

SEQ ID NO: 3065 - DNA, 477 bp, Haemophilus influenzae
atgacacctgcaattgatttacttaaaaaacaaaaaattccttttatcttgcacacttatgatcatgatccgaataatcaacattttggtgatgaggcggcagaaaaattaggcattgatcctaaccgctcttttaaaaccttacttgtggcggaaaatggcaatcagaaaaaactcgcttgttttgtgcttgcaacggccaatatgctgaatttaaagaaagcagcaaaatctatcggtgtgaaaaaagtggaaatggcggataaagatgcagcacaaaaaagtacaggctatcttgtggggggaattagcccgctaggtcaaaagaaacgcgtgaaaaccgtgataaattcaaccgcacttgagtttgaaacgatttatgtttcaggcggaaaacgtgggctaagcgtagaaattgcgccacaagatttagcaaaagtattaggtgcagaatttactgatattgttgatgaataa

SEQ ID NO: 3066 - protein, 158 aa, Haemophilus influenzae
MTPAIDLLKKQKIPFILHTYDHDPNNQHFGDEAAEKLGIDPNRSFKTLLVAENGNQKKLACFVLATANMLNLKKAAKSIGVKKVEMADKDAAQKSTGYLVGGISPLGQKKRVKTVINSTALEFETIYVSGGKRGLSVEIAPQDLAKVLGAEFTDIVDE

SEQ ID NO: 3067 - DNA, 264 bp, Haemophilus influenzae
ttgttgatttattgttttaataggcgaagcctagagaggtcttttatggaaattggtattgtaaaatggttcaataatgcaaaaggatttggtttcatttccgcagaaggtgtagatgccgatatttttgcacattattcagtgattgaaatggacggctatcgttcattaaaagcgggtcaaaaagtacaatttgaagttctccacagcgataaaggatctcacgccacaaaaataatcccaattgcggatactcaagaataa

SEQ ID NO: 3068 - protein, 87 aa, Haemophilus influenzae
MLIYCFNRRSLERSFMEIGIVKWFNNAKGFGFISAEGVDADIFAHYSVIEMDGYRSLKAGQKVQFEVLHSDKGSHATKIIPIADTQE

SEQ ID NO: 3069 - DNA, 171 bp, Haemophilus influenzae
ttggatgggaaaatgtttgatattaacttaacacacgaacagcaacaaaaagcagttgagcaaattcaagaacttatggcaaaaggaattagtagtggagaagcgattcaaatagtggcgaaagcactacgagaaattcataaaaatgataaaaaaactccagaaaattaa

SEQ ID NO: 3070 - protein, 56 aa, Haemophilus influenzae
MDGKMFDINLTHEQQQKAVEQIQELMAKGISSGEAIQIVAKALREIHKNDKKTPEN

SEQ ID NO: 3071 - DNA, 720 bp, Haemophilus influenzae
atgttagaaattttatatcaagatgagtttctcgtagcggtgaataagcctgctggtatgctggttcatcgcagttggttagatcctcacgaaactcaatttgtgatgcaaaccttgcgagatcagattggtcagcacgtatttcctattcatcgtttagatcgaccgacatctggtgtgttgttatttgcattgagcagtgaaattgcgaatttaatgtgtgaacagtttgaacaaaagtgcgttcagaaatcttatttggctgtagtgcgagggtatctacagggaaaagagcggatagattatccactaaaaattcaattggataaaatcgcagataaattttctcaagaagataaagagcctcaagaagcagtgactgattatgaaggattaaaaatagtcgaaatgccttatcctgctgggcgttatcaaacggcgcgttattctttagttaaattaatccctcatacaggtagaaaacaccaattacgtcgccatatgaaacatatttttcacccaattttaggtgatacgcaatatggtgacttacatcaaaatcgtgcattaacgtttcatctaggcttttctcggttatttttacattctaatagtttgtcttttattcatccaataaagaaagagcaaataacaattacagcaggtttagatgaacaatggcagcaattaatgaatcaatttggatgggaaaatgtttga

SEQ ID NO: 3072 - protein, 239 aa, Haemophilus influenzae
MLEILYQDEFLVAVNKPAGMLVHRSWLDPHETQFVMQTLRDQIGQHVFPIHRLDRPTSGVLLFALSSEIANLMCEQFEQKCVQKSYLAVVRGYLQGKERIDYPLKIQLDKIADKFSQEDKEPQEAVTDYEGLKIVEMPYPAGRYQTARYSLVKLIPHTGRKHQLRRHMKHIFHPILGDTQYGDLHQNRALTFHLGFSRLFLHSNSLSFIHPIKKEQITITAGLDEQWQQLMNQFGWENV

SEQ ID NO: 3073 - DNA, 321 bp, Haemophilus influenzae
atgcgtaatcaaactaaacagcatcttgaacagcttcaaattaccatgcagcagcttaatttatggcaaacgatgccccctgctgcagaggcgtttttaagtgaagaacctttttcaattgatacgatgtctgccgaagagtggctacagtgggtatttattccacgcatgcaggcattgttagaaagtggttcagccttgccaaataaaattgccatttcgccttatattgaagaagcaatgaaggaatttaatgagttacaacaactattaattcctttagttgctttagaagaacttctgaacaagaaccaatgttag

SEQ ID NO: 3074 - protein, 106 aa, Haemophilus influenzae
MRNQTKQHLEQLQITMQQLNLWQTMPPAAEAFLSEEPFSIDTMSAEEWLQWVFIPRMQALLESGSALPNKIAISPYIEEAMKEFNELQQLLIPLVALEELLNKNQC

SEQ ID NO: 3075 - DNA, 1407 bp, Haemophilus influenzae
gtgcgtaaacgtttcgcaaaaattttaacctctaatatccgcaatattttacagaaatatgatgaagaaaccgcagttgtgcgtcactgggattacattgaagtgcggtcaaaaaatgaagaaaatcgtgaagaattaatcgccttgttacaacgtattcctggtattcatcattttttagaagttgaagaaaaaccatttaccgatttgcatcatatttttgaattgacgcttgctgatgtcgcacaacaacttcaaggcaaaaccttttgtgttcgagtaaaacgtaaaggaaaacataaatttagttcgattgaagcagaacgttatatcggcggtggattaaatcaacacattgaaagtgcaaaagtgcggttgaaaaatccagatgtgactgttcgtattgatattgaagatgacaaaatgatgttagttaaagcacgtcacgctgggattggcggttatccgattggtacgcaagaagatgtgctttctttaatttcagggggatttgattcaggcgtatcgagttatatgttgattcgtcgtggttcccgagttcattattgtttctttaatcttggcggtgcagcccatgaaattggcgttaaacaaatggcttatcatatttggcaacgctatagctcttcacataaagtacgctttattgcgattaactttgagggagttgtcggtgagattttagagaaagtcgataacggacaaatgggtgttgtattaaaacggatgatggtgcgagccgcaagtaaagtcgctcaacgtttcaatattgaagcaattgtgacaggggaggcattagggcaagtttctagccaaactttaaccaatttacgcttgattgatgaagccgctgatgccttagtattacgtccgttaattacccatgataaagaacaaattatcgcgatggcgaaagaaattggtactgacgatattgcaaaatctatgcctgaattttgtggcgtgatttcaaaaaatcctacgattaaagctgttcgtgaaaagattcttaaagaagaagggcattttaattttgagattcttgaaagtgcggtacaaaatgcgaaatatttagatattcgccagatcgcagaagaaacagaaaaagaagtcgtggaagttgaggcaatttctgtattaggtgaaaatgaagtgattttggatattcgcagcccagaagaaacggatgaaaatccatttgaatcaggtacacatgacgtcattcaaatgccgttctacaaactttcttctcaatttggtagccttgatcaaagtaaaagttacgtgttgtattgtgaacgtggtgtgatgagtaaattacaagccttatatttgaaagaaaatggtttttcaaatgtgcgtgtatttgcaaaaaacattcattaa

SEQ ID NO: 3076 - protein, 468 aa, Haemophilus influenzae
MRKRFAKILTSNIRNILQKYDEETAVVRHWDYIEVRSKNEENREELIALLQRIPGIHHFLEVEEKPFTDLHHIFELTLADVAQQLQGKTFCVRVKRKGKHKFSSIEAERYIGGGLNQHIESAKVRLKNPDVTVRIDIEDDKMMLVKARHAGIGGYPIGTQEDVLSLISGGFDSGVSSYMLIRRGSRVHYCFFNLGGAAHEIGVKQMAYHIWQRYSSSHKVRFIAINFEGVVGEILEKVDNGQMGVVLKRMMVRAASKVAQRFNIEAIVTGEALGQVSSQTLTNLRLIDEAADALVLRPLITHDKEQIIAMAKEIGTDDIAKSMPEFCGVISKNPTIKAVREKILKEEGHFNFEILESAVQNAKYLDIRQIAEETEKEVVEVEAISVLGENEVILDIRSPEETDENPFESGTHDVIQMPFYKLSSQFGSLDQSKSYVLYCERGVMSKLQALYLKENGFSNVRVFAKNIH

SEQ ID NO: 3077 - DNA, 255 bp, Haemophilus influenzae
atggcgcgtaaacccgcatcttcacaagattttgaaacaacattagcgaagttagaaaatattgttacacatttagaaaatggcgatctaccgttagaagaagcgttaaaagaatttgaacaaggtgtgcaactcgctaagctaggacaagaacgtttacaacaagcagaacaacgtattcagatcttattgcaaaaaacagaagatgcgccactgaatgattataaagggaatgattatgaagggaatgcttaa

SEQ ID NO: 3078 - protein, 84 aa, Haemophilus influenzae
MARKPASSQDFETTLAKLENIVTHLENGDLPLEEALKEFEQGVQLAKLGQERLQQAEQRIQILLQKTEDAPLNDYKGNDYEGNA

SEQ ID NO: 3079 - DNA, 891 bp, Haemophilus influenzae
atgggtcacttttctgaagaattacaacaggttcaaattcgtatcaatcgctttttagaagctcaatttgagggcattgaaagtcataatgcacctttgcttgaggcgatgaaatacgcattattacttggcggtaagcgagttcgccctttcttagtttacgcaacaggtcaaatgcttggtgcagagaaacaaaccttagattacgctgctgctgccattgaagccattcacgcctattccttaattcacgatgatttacctgcgatggatgatgataatctacgccgtggacatcctacttgtcatatccaatttgatgaagctacagctattcttgcgggcgatgcgctgcaaagtttcgcatttgaaatattgaccaaaacaccgaatatttctgctgaacaaaaactggctttaattcaaattttagcgcaaggcgctggtgtgcaaggaatgtgtttagggcaaagtttagatcttatttctgagcataaacagattagtttaagcgaattagaattaattcatcgtaacaaaacgggtgcattgctaattgccgcattgaaattaggtttcatttgttctccgcattttaccgaccaaaggttagaacaatccttaacacaatatgcggaagccattggtttagcctttcaagttcaagacgatattttagatattgaaggcgatagtgcagaaattggcaaacaggtgggcgccgatcttgatttagataaaagtacatatccaaaattacttggattaagtggtgcaaaacaaaaagcgcaagatctatatcaaagtgctttgtctgaattagaaaaaattccttttgatacaaccgcacttcgtgcattagctgaattcattattaccagaaaaagttaa

SEQ ID NO: 3080 - protein, 296 aa, Haemophilus influenzae
MGHFSEELQQVQIRINRFLEAQFEGIESHNAPLLEAMKYALLLGGKRVRPFLVYATGQMLGAEKQTLDYAAAAIEAIHAYSLIHDDLPAMDDDNLRRGHPTCHIQFDEATAILAGDALQSFAFEILTKTPNISAEQKLALIQILAQGAGVQGMCLGQSLDLISEHKQISLSELELIHRNKTGALLIAALKLGFICSPHFTDQRLEQSLTQYAEAIGLAFQVQDDILDIEGDSAEIGKQVGADLDLDKSTYPKLLGLSGAKQKAQDLYQSALSELEKIPFDTTALRALAEFIITRKS

SEQ ID NO: 3081 - DNA, 1863 bp, Haemophilus influenzae
atgaacaattatcctcttttatctttaattaattctccagaagatttgcgtcttttaaataaagatcagctaccacaactctgtcaagaattacgtgcttatcttttagaatctgttagtcaaactagcggacatttagcgtcaggtttaggcactgtagagctaaccgttgcgctgcattatgtatataagacgccatttgatcagttaatttgggatgtgggacatcaagcctatccacataaaatcctaacgggtcgccgagagcaaatgtccacaattcgccaaaaagacggtattcatccttttccttggcgtgaagaaagtgaatttgatgtattaagtgttggtcactcctctacttctattagtgctggattaggtattgccgttgccgcagaacgagaaaatgcaggtagaaaaacagtatgcgtaatcggtgatggcgcaattactgcgggaatggcatttgaggcattaaatcacgcaggggcattgcatacagatatgttagttattttaaatgataacgaaatgtctatttcagaaaacgttggcgcattaaataatcatcttgcacgtattttctctggctctctttactctacgcttcgtgatggcagtaaaaaaatccttgataaagttcctccaatcaaaaactttatgaaaaaaaccgaagaacatatgaaaggtgtaatgttttcgccagaaagtacattatttgaagaactcggttttaactatattggcccagtggatgggcataacattgatgaattagtggctacgcttacgaatatgcgtaatctgaaaggcccacaatttttgcatataaaaacgaaaaaaggtaaaggatacgcacccgcagaaaaagatccgattggtttccacggtgtacctaaatttgatccaatcagtggcgaattgcccaaaaacaatagtaaaccaacttattcgaaaatttttggcgattggctatgtgaaatggcagaaaaagatgccaaaattataggtatcacacctgcaatgcgtgagggttcaggtatggtagaattttcccaacgcttcccaaaacaatattttgacgtagcgattgcagaacagcacgctgtcacgtttgccacaggacttgcaattggcggatataaacctgtcgtcgcaatttactcgacatttttacaacgtgcttacgatcaattaattcacgatgttgccattcaaaatctccctgtgctatttgcaattgatcgagcagggatagttggtgcagatggggctacacatcaaggtgcattcgatattagctttatgcgttgcattccaaatatgatcattatgacgccgagtgatgaaaatgaatgccgtcaaatgctctatactggttatcaatgtggaaaacctgcggcagtacgctatcctcgcggaaatgccgttggtgtaaaacttactcctttagaaatgcttcctattggtaaatcacgtttaattcgaaaaggtcaaaaaattgcgattttaaattttggtactctattaccatccgctttagagttatcagaaaaactcaatgcaacggttgtcgatatgcgttttgtgaaaccgattgatattgaaatgattaatatgcttgcacaaactcacgattatttggtcacattggaagaaaatgcaattcaaggtggagcgggatctgctgttgcggaagtactaaattcatcaggaaaatcaaccgcacttttacaacttggtttgccagattattttattccacaagcgacacagcaagaagcattggcagatttaggattggatacaaaaggcattgaagaaaaaattctttcttttattcagaaaactccaaattaa

SEQ ID NO: 3082 - protein, 620 aa, Haemophilus influenzae
MNNYPLLSLINSPEDLRLLNKDQLPQLCQELRAYLLESVSQTSGHLASGLGTVELTVALHYVYKTPFDQLIWDVGHQAYPHKILTGRREQMSTIRQKDGIHPFPWREESEFDVLSVGHSSTSISAGLGIAVAAERENAGRKTVCVIGDGAITAGMAFEALNHAGALHTDMLVILNDNEMSISENVGALNNHLARIFSGSLYSTLRDGSKKILDKVPPIKNFMKKTEEHMKGVMFSPESTLFEELGFNYIGPVDGHNIDELVATLTNMRNLKGPQFLHIKTKKGKGYAPAEKDPIGFHGVPKFDPISGELPKNNSKPTYSKIFGDWLCEMAEKDAKIIGITPAMREGSGMVEFSQRFPKQYFDVAIAEQHAVTFATGLAIGGYKPVVAIYSTFLQRAYDQLIHDVAIQNLPVLFAIDRAGIVGADGATHQGAFDISFMRCIPNMIIMTPSDENECRQMLYTGYQCGKPAAVRYPRGNAVGVKLTPLEMLPIGKSRLIRKGQKIAILNFGTLLPSALELSEKLNATVVDMRFVKPIDIEMINMLAQTHDYLVTLEENAIQGGAGSAVAEVLNSSGKSTALLQLGLPDYFIPQATQQEALADLGLDTKGIEEKILSFIQKTPN

SEQ ID NO: 3083 - DNA, 234 bp, Haemophilus influenzae
ttgagaaagttatttattcaacgacgtaatgatttaggattattacagcgtgcattaggtaaaaaaatgggcgtgcttgcgtcatttattggaaaagtagaaacaggtgaccgaagactagatattcttgaatttattcaatattgtaaaggattagagcttgatcctgttcagatattagatgatattgagaaacgattttattctactttagaaactagaaaacacatctaa

SEQ ID NO: 3084 - protein, 77 aa, Haemophilus influenzae
MRKLFIQRRNDLGLLQRALGKKMGVLASFIGKVETGDRRLDILEFIQYCKGLELDPVQILDDIEKRFYSTLETRKHI

SEQ ID NO: 3085 - DNA, 453 bp, Haemophilus influenzae
atggaacataaatcttctcctaaacgcccttatttattacgtgcctattatgattggttagtagataatagttttacaccttatttagttgttgatgcgacttacttaggtgtgaatgttcctgtcgaatatgtaaaagatggacagattgtattaaacttgtctgccagtgctacgggcaatttacaacttacaaatgatttcatccagtttaatgcgcgttttaaaggcgtctctcgtgaactgtatattccaatgggcgcagcccttgcgatttatgctcgtgagaatggcgatggcgtgatgtttgaacctgaggaaatttatgatgaacttaacattgagccagatactgaacaaccaacaggtttttatgaagcagtagataagcctaaaaagcgagaagaaaaaaagaaaacaaaatcagtttcccatttaagaattgtggattaa

SEQ ID NO: 3086 - protein, 150 aa, Haemophilus influenzae
MEHKSSPKRPYLLRAYYDWLVDNSFTPYLVVDATYLGVNVPVEYVKDGQIVLNLSASATGNLQLTNDFIQFNARFKGVSRELYIPMGAALAIYARENGDGVMFEPEEIYDELNIEPDTEQPTGFYEAVDKPKKREEKKKTKSVSHLRIVD

SEQ ID NO: 3087 - DNA, 639 bp, Haemophilus influenzae
atgtccagcgcatcaagtaaacgttcagtaatgacccttttttcaaataaagatgatatttattgccatcaggtaaaaattgttttggcagaaaaaggtgtgctttatgaaaacgcagaggttgatttgcaagctctaccagaagatttaatggaattaaatccatacggcactgtgcctacgttggttgatcgtgatctcgtattatttaattcacgcatcataatggaatatcttgatgaacgttttccacatcctccactaatgcaagtgtatcctgtttctcgtgctaaagatcgacttttaatgttacgtattgaacaagattggtatccaacacttgcaaaagcagaaagtggcacagaaaaagaaaaaacttcagcattaaaacagttaaaagaagaactattggggattgcaccaatttttcaacagatgccttattttatgaatgaagaatttggtttggttgattgctatgttgcaccattattatggaaattaaaacatttaggtgtggaatttacaggcacaggaagtaaagcgattaaagcttatatggaacgtgtgtttacacgtgattcttttttgcaatctgtaggtgaagctgcaccaaaaaatttaatggatgataaataa

SEQ ID NO: 3088 - protein, 212 aa, Haemophilus influenzae
MSSASSKRSVMTLFSNKDDIYCHQVKIVLAEKGVLYENAEVDLQALPEDLMELNPYGTVPTLVDRDLVLFNSRIIMEYLDERFPHPPLMQVYPVSRAKDRLLMLRIEQDWYPTLAKAESGTEKEKTSALKQLKEELLGIAPIFQQMPYFMNEEFGLVDCYVAPLLWKLKHLGVEFTGTGSKAIKAYMERVFTRDSFLQSVGEAAPKNLMDDK

SEQ ID NO: 3089 - DNA, 393 bp, Haemophilus influenzae
atggcagagaatcaaaactacggcacaggccgccgcaaaagctcttcagctcgtgtatttatcaaaccgggcagtggtaaaatcactatcaaccaacgtgaattagatgtttactttggtcgcgaaacagcacgtatggtagtacgtcagccattagagttggttgaattaactgataaattagacctatacatcactgttaaaggtggtggtatttctggtcaagcgggtgcgatccgtcacggtatcactcgtgcattgatggaatacgatgaaacattacgcccagcacttcgtgcagctggtttcgttactcgtgacgcacgtcgcgttgaacgtaaaaaagtgggtttacacaaagcacgtcgtcgtccacaatactcaaaacgttaa

SEQ ID NO: 3090 - protein, 130 aa, Haemophilus influenzae
MAENQNYGTGRRKSSSARVFIKPGSGKITINQRELDVYFGRETARMVVRQPLELVELTDKLDLYITVKGGGISGQAGAIRHGITRALMEYDETLRPALRAAGFVTRDARRVERKKVGLHKARRRPQYSKR

SEQ ID NO: 3091 - DNA, 429 bp, Haemophilus influenzae
atgaaaacttttgtagcaaaaccagaaacggttaaacgcgactggtacgtagtagatgcgacaggtaaaactttaggtcgtttagcgactgaattagcacgtcgtcttcgtggtaaacacaaggctgagtacactccacacgtagatactggtgattacatcatcgttatcaacgcagacaaagtggcagtaactggtcgtaaagaaacagataaactttactactggcacactggctatgtaggtggtattaaacaagcgactttcaaagaaatgatcgctcgccgtcctgaagcagtgattgaaattgcggttaaaggtatgttgccaaaaggtccattaggccgtgcaatgttccgtaaattaaaagtgtatgcaggtgctgaacaccaacacgcagcacaacaaccacaagtattagatatttaa

SEQ ID NO: 3092 - protein, 142 aa, Haemophilus influenzae
MKTFVAKPETVKRDWYVVDATGKTLGRLATELARRLRGKHKAEYTPHVDTGDYIIVINADKVAVTGRKETDKLYYWHTGYVGGIKQATFKEMIARRPEAVIEIAVKGMLPKGPLGRAMFRKLKVYAGAEHQHAAQQPQVLDI

SEQ ID NO: 3093 - DNA, 879 bp, Haemophilus influenzae
atgagctacgcgaaagaaattgatacattaaatcaacatattgcagattttaataaaaaaattaatgtctcctttgaattttttccacctaaaaacgaaaaaatggaaacccttctatgggattcaattcatcgtttaaaagtattaaagcctaaatttgtgtcagtcacttacggcgcaaattcgggagaacgtgaccgcactcacggcattgtgaaagccattaaacaagaaactggcttagaggccgcaccacatttaactggaattgatgccacacctgaagaattaaaacaaattgcgagagattattgggatagtggtattcgccgtattgttgcgttacgcggtgacgaacctaaaggttacgcgaaaaaaccattttatgcgtcagatcttgtggaattactccgttctgtcgctgattttgatatttctgtagccgcttatcctgaagttcatccagaagcaaaatccgcacaagcagacttaattaatttaaaacgtaaaattgatgcaggtgcaaaccacgtcattacacaatttttctttgatattgaaaactacctacgttttcgtgatcgttgtgcatcaattggtattgatactgaaatcgtacccggtattttacctgttactaattttaaacaactccaaaaaatggcatcattcactaatgtgaaaattccagcgtggttagttaaagcctatgatggtttggataatgatccaactacacgtaatcttgtggcagcaagtgttgcaatggatatggtaaaaattttatctcgcgaaggcgtgaatgacttccacttttatacattaaatcgtagtgaattaacttatgctatctgtcatatgttaggtgtaagaccttaa

SEQ ID NO: 3094 - protein, 292 aa, Haemophilus influenzae
MSYAKEIDTLNQHIADFNKKINVSFEFFPPKNEKMETLLWDSIHRLKVLKPKFVSVTYGANSGERDRTHGIVKAIKQETGLEAAPHLTGIDATPEELKQIARDYWDSGIRRIVALRGDEPKGYAKKPFYASDLVELLRSVADFDISVAAYPEVHPEAKSAQADLINLKRKIDAGANHVITQFFFDIENYLRFRDRCASIGIDTEIVPGILPVTNFKQLQKMASFTNVKIPAWLVKAYDGLDNDPTTRNLVAASVAMDMVKILSREGVNDFHFYTLNRSELTYAICHMLGVRP

SEQ ID NO: 3095 - DNA, 729 bp, Haemophilus influenzae
atgagtagcttttttgtcgcagggacagatactaatgtggggaaaacaacagcagcacgcgcaatgattcaagccttgcaagagcagggagtacaagttgtcggctataaacctattgcttgttgtggagaagagagtatttatcctgtcgcgcaatcagaaaatacatctgattatgatcatttcgtaaatgctgatgtattaacgctgatgcattcaacaaaggaaaatgtgtcttatcaggatattaatagttatacttttagccactgtgcacccatgctcacacaagataaaatgcggattaaattagataaaattaattgtgatttaacgcgtttgaatcaaacttatcaatctgttgtggtggaaggatcttttggtttaatgacaccaatggcagaaggaaaaagttttgcagattggattactcaacgaaaaatgccagtagtacttgtagttggaattaaagatggttgcgtaaatcacgctttattgacggtaaaggttatccaacaattgggtgtgccgttattaggttggatagcaaatcgaattaatccattattaagccattatgcagaaattgttgatttacttgttgaacatattgatgcgccgcttttaggtaaaattccttatttacataaacccgaagaacaagaattagggcattatttaacgaatatagatcgattaatgtatatgcaaacagagttcataaaataa

SEQ ID NO: 3096 - protein, 242 aa, Haemophilus influenzae
MSSFFVAGTDTNVGKTTAARAMIQALQEQGVQVVGYKPIACCGEESIYPVAQSENTSDYDHFVNADVLTLMHSTKENVSYQDINSYTFSHCAPMLTQDKMRIKLDKINCDLTRLNQTYQSVVVEGSFGLMTPMAEGKSFADWITQRKMPVVLVVGIKDGCVNHALLTVKVIQQLGVPLLGWIANRINPLLSHYAEIVDLLVEHIDAPLLGKIPYLHKPEEQELGHYLTNIDRLMYMQTEFIK

SEQ ID NO: 3097 - DNA, 249 bp, Haemophilus influenzae
gtgccatttaagaagttaggaagttacctttatgttgccaatagagaggatttttctttagttcccagcgttttactcgaacattttggtaaaccagaattagtgatgatgtttaatctgcttgggcgtaaagcactacacaatatagattgtaatgaagtattagaaacaattaaacgccaaggattttacttacaaatagcaaaacaagatgatggtttatttaatagcttgagtgagatcaaataa

SEQ ID NO: 3098 - protein, 82 aa, Haemophilus influenzae
MPFKKLGSYLYVANREDFSLVPSVLLEHFGKPELVMMFNLLGRKALHNIDCNEVLETIKRQGFYLQIAKQDDGLFNSLSEIK

SEQ ID NO: 3099 - DNA, 657 bp, Haemophilus influenzae
atgagcaaaatttcactggatgcactgaatgtaagaaatgccttgattgaaaaaggtattgagacacccatgattgatccaacacaggctaaaaatgaacgccgagaaagcattgcaaaacatatgaatgaagtgatgaaactgattggattagatttgcgagatgatagtttagaagaaacgccaaatcgtttagctaaaatgtttattgatgagatttttagtggaatggattatgcgaattttccaaagatgacaaaaatcaaaaatcaaatgaaagtcagcgaaatggtgcaagtgaatgacatcacgctaacaagcacttgtgaacatcattttgtgacgattgatggtaaagtttgtgtggcatactatccaaaagattgggtgattggtctttctaaaattaatcgaatcgtttcattttttgcgcaacgtccacaggttcaagaacgcttaactgagcaacttttgacagcatttcaaaccattcttgaaaccgatgatgtggcggtatatgtgagagcgacccatttctgtgtgaaagcgcgtggtattagagatacaaatagttatactgtcacatctgcttatggtggcgtattcttagaagatagagatactcgtaaagaatttttagctacagttcaaaaatag

SEQ ID NO: 3100 - protein, 218 aa, Haemophilus influenzae
MSKISLDALNVRNALIEKGIETPMIDPTQAKNERRESIAKHMNEVMKLIGLDLRDDSLEETPNRLAKMFIDEIFSGMDYANFPKMTKIKNQMKVSEMVQVNDITLTSTCEHHFVTIDGKVCVAYYPKDWVIGLSKINRIVSFFAQRPQVQERLTEQLLTAFQTILETDDVAVYVRATHFCVKARGIRDTNSYTVTSAYGGVFLEDRDTRKEFLATVQK

SEQ ID NO: 3101 - DNA, 1215 bp, Haemophilus influenzae
atgcttacattggatcaagctcgctcgaaaatgcttgaacagcttcccttcccgactcaaactgaatacctaaatttacaagaagccgccaatcgaatttgtgcagaagatattatttcgcctatcaatgttccctctttcgataattcagcaatggatggttatgctgtacgtttatcggatttacaacaatccttaaccctttcagtggcaggaaaatcttttgcaggtaatccattccaaggggaatggccatcaaaaagtgcggtcagaattatgactggtgcgatgattcctgaaggcgcagatgccgtgataatgcaagagcaagtgacactcaatgaagacggtaccgtcacttttagtgaattgcctaaaccaagccaaaacatccgccgtattggagaagatgtagaaaaaggcgatgtggtattagcacaaggcgcacctctcacccctgtttccttgccattattagcctctttaggcattgcagaagtaaaatgctatcgtcaattaaaagtcggcgtactctcaactggcgatgaacttgtggaagtcggcaagccattacaaagcggacaaatctatgacactaaccgttttaccgtaaaattactgctagaaaaactaaactgtgaagtcattgatttagggctattacctgataacgaagctgaatttgaaaaagcatttattgtcgcacaaagccaagccgatttagtgattaccagtggcggtgtttccgttggtgaagcggatttcactaaagcggtattggaaaaagtaggtcaagtaaatttctggaaaattgcaatcaaaccgggcaaaccattcgcttttggtaaattagaaaacgcttggttctgtggtttacccggtaatcctgtttctgcattagtgacattttatcaacttgttcagccactcattgctaaacttcaaggccaaaaacaatggaaaaatctaccgcacttttcagccattgccacaatgaatttgaaaaaaacagtgggacgtttagacttccaacggggtttttatcacatcaatgaacaaggtcaaattgaagtacaatcagtgggattccaaggatctcatctctttagcacttttgtaaaaagcaattgttttatcgttttagaacaagaacgaggcaatgtttctgcgggcgaaacagtgataattgagcctttcaatcatttattaggataa

SEQ ID NO: 3102 - protein, 404 aa, Haemophilus influenzae
MLTLDQARSKMLEQLPFPTQTEYLNLQEAANRICAEDIISPINVPSFDNSAMDGYAVRLSDLQQSLTLSVAGKSFAGNPFQGEWPSKSAVRIMTGAMIPEGADAVIMQEQVTLNEDGTVTFSELPKPSQNIRRIGEDVEKGDVVLAQGAPLTPVSLPLLASLGIAEVKCYRQLKVGVLSTGDELVEVGKPLQSGQIYDTNRFTVKLLLEKLNCEVIDLGLLPDNEAEFEKAFIVAQSQADLVITSGGVSVGEADFTKAVLEKVGQVNFWKIAIKPGKPFAFGKLENAWFCGLPGNPVSALVTFYQLVQPLIAKLQGQKQWKNLPHFSAIATMNLKKTVGRLDFQRGFYHINEQGQIEVQSVGFQGSHLFSTFVKSNCFIVLEQERGNVSAGETVIIEPFNHLLG

SEQ ID NO: 3103 - DNA, 732 bp, Haemophilus influenzae
atgatcgagcttagtcacgaagaagaattgcgttataaccgtcaaattattcttaaaagcatagattttgatgggcaagaaaaactcaaagcaagcaaaatgttgatcgttgggcttggcggcttaggttgcgcagccagccaatatctcgcagcggcaggcgttggcaatttaacgctgttggatttcgatactgtttctctttcgaatcttcagcgacaagtcttgcactgcgatgcacgcttgaatatgcccaaagtagagtcagctaaaattgcactggaacaaatcaatccacatataaacattgagacgattaatgctaagttagacgaagaaaaactcgcagagatcattccgcactttgatattgttttagattgtacagacaatgtagaaatccgtaatcaattggatcgccaatgtaataatgcaaaaatccctcttatttcaggtgcggcaattcgaatggaaggtcaggtttccgttttcacttatgaaccgaatacacccacttatcgtgatctcagcaaattatttgggcaaaatatattaagctgtgtagaagcaggcgtgcttgcaccaatcgtcggcattgtgggaagcattcaagccttagaagcaattaaagtgcggttaaaaaccggtaagaatttgtgtggacgcttattgatgattgatggtttttcgatgaatattcgagaaattaagcttccaaccaatatggaataa

SEQ ID NO: 3104 - protein, 243 aa, Haemophilus influenzae
MIELSHEEELRYNRQIILKSIDFDGQEKLKASKMLIVGLGGLGCAASQYLAAAGVGNLTLLDFDTVSLSNLQRQVLHCDARLNMPKVESAKIALEQINPHINIETINAKLDEEKLAEIIPHFDIVLDCTDNVEIRNQLDRQCNNAKIPLISGAAIRMEGQVSVFTYEPNTPTYRDLSKLFGQNILSCVEAGVLAPIVGIVGSIQALEAIKVRLKTGKNLCGRLLMIDGFSMNIREIKLPTNME

SEQ ID NO: 3105 - DNA, 324 bp, Haemophilus influenzae
atgacaacagaaattaaaaaacttgatccagatacagccattgatattgcttacgatattttcttagaaatggctggagaaaatttagatcctgctgatattcttttattcaacctacaatttgaagaacgcggtggtgtggaatttgttgaaaccgccgatgattgggaagaagaaattggtgtactaattgacccagaagaatacgccgaagtgtgggtgggcttagtcaatgagcaagatgaaatggatgatgtctttgctaaattcttaatttctcaccgagaagaagatcgcgaatttcacgttatttggaaaaagtaa

SEQ ID NO: 3106 - protein, 107 aa, Haemophilus influenzae
MTTEIKKLDPDTAIDIAYDIFLEMAGENLDPADILLFNLQFEERGGVEFVETADDWEEEIGVLIDPEEYAEVWVGLVNEQDEMDDVFAKFLISHREEDREFHVIWKK

SEQ ID NO: 3107 - DNA, 471 bp, Haemophilus influenzae
atgaaaaaactactatccatatttctaatggcattcagcctaaacgcttttgcacaaactaatttggcggatgtgcaactcaaagatttaaacaatcagccagttactttaagccaatataaaggcaaacccgtgtatgtaaaaatgtgggcatcttggtgtccaatttgtttggcaggattagctgaaattgatgatttaagtgcggaaaaagatcgcaattttgaagtgattaccattgtttcacccgatcacaaaggcgaaaaagacaccgctgattttattgagtggtacaagggattagaatataaaaatatcacggtgcttttagatgaaaaaggcgaaatcattgataaagcaagagtgcgtggctatccgttcaatctctttttagatagtgatttaaacctgaaaaaaaccgtaccaggacatttaggtgcagagcaaattcgagtgtttgctgaaaaataa

SEQ ID NO: 3108 - protein, 156 aa, Haemophilus influenzae
MKKLLSIFLMAFSLNAFAQTNLADVQLKDLNNQPVTLSQYKGKPVYVKMWASWCPICLAGLAEIDDLSAEKDRNFEVITIVSPDHKGEKDTADFIEWYKGLEYKNITVLLDEKGEIIDKARVRGYPFNLFLDSDLNLKKTVPGHLGAEQIRVFAEK

SEQ ID NO: 3109 - DNA, 642 bp, Haemophilus influenzae
atgttagatcaacaactccttattggaactgtatttttagctgggcttgcttcttttctttcgccttgtattttcccgattattccaatttattttggtattttgagtaaaggcggtaaaaaagtcctaaatacttttttatttattttagggctttcccttacatttgtcagtttaggctttagttttggttttttagggaatattttatttagtaacaccacccgcattatcgctggtattattgtgattattttgggtattcatcaacttggcattttcaaaattggtttgttggaacgcacaaaattggtggaaataaaaacatcaggaaaatcaaccgcacttgaggcatttgtccttggtttaacctttagccttggttggacgccttgtattggcccgattttggcttccgtgttagctttatcaggcgatgaaggatccgcactttacggtgcatcaatgatgttcgtttatgttttaggcttggcaacgccgtttgtattattttcattcttctcagacagcttgctaaaacgtgctaaagggttaaataaacacttagacaaatttaaaatcgctggcggaattttaattatcgtgatgggtattttattgattacgaataatttttcgtaa

SEQ ID NO: 3110 - protein, 213 aa, Haemophilus influenzae
MLDQQLLIGTVFLAGLASFLSPCIFPIIPIYFGILSKGGKKVLNTFLFILGLSLTFVSLGFSFGFLGNILFSNTTRIIAGIIVIILGIHQLGIFKIGLLERTKLVEIKTSGKSTALEAFVLGLTFSLGWTPCIGPILASVLALSGDEGSALYGASMMFVYVLGLATPFVLFSFFSDSLLKRAKGLNKHLDKFKIAGGILIIVMGILLITNNFS

SEQ ID NO: 3111 - DNA, 1062 bp, Haemophilus influenzae
atgaaactatcaaaaacatttctatttattaccgcactttgctgtgcagcaccaactttagcaatacaaaattcaacatcatcatctggagaacaaaaaatggcaatggaaaatacacaaaacattcgagaaatttatcttgctggcggctgtttttggggtatggaagcatatatggagcgtattcacggtgtgaaagatgcgatttctggctatgcaaatggtaatacggagaaaaccagttatcagatgattgggctaaccgatcacgcagaaacggtaaaagtcacttacgatgcaaaccaaatttcgttagataaattgcttaaatattattttaaagtgattgatccaaccagcgtaaacaaacaaggtaacgaccgtggcagacaatatcgcacagggatttattatcaagatggagcagataaagcggtgatcgaacaagcactcgcccagcttcaaaccaaatataaaaaaccagtacaagttgaggtacaaccgattaaaaattacatcgtagcagaagaatatcatcaggattatttgaagaaaaatccaaatggctactgccatattgatattaccaaagcagatgaacctgtgattgatgagaaagattatccgaaaccgagtgatgcggaactcaaagcgaaattgacaccgttgcaatattccgttactcaaaataaacatactgaacgctcttttagtaacgaatattgggataacttccaacctggtatttatgttgatgtcactacaggcgagcctgttttctcttcaaatgataaatttgaatcaggttgtggctggccaagttttacgaaaccgatcattaaagatgtagtgcattatgaaaccgacaacagcttcaatatgcaacgtaccgaagtattaagccgtgcgggcaatgctcatttaggtcacgtttttgatgacggcccgaaagataaaggtggtttgcgttattgcattaacagtgcatcaattaaatttatcccgttagcagaaatggaaaaggcaggatatggatatttgattcaatccattaaaaaataa

SEQ ID NO: 3112 - protein, 353 aa, Haemophilus influenzae
MKLSKTFLFITALCCAAPTLAIQNSTSSSGEQKMAMENTQNIREIYLAGGCFWGMEAYMERIHGVKDAISGYANGNTEKTSYQMIGLTDHAETVKVTYDANQISLDKLLKYYFKVIDPTSVNKQGNDRGRQYRTGIYYQDGADKAVIEQALAQLQTKYKKPVQVEVQPIKNYIVAEEYHQDYLKKNPNGYCHIDITKADEPVIDEKDYPKPSDAELKAKLTPLQYSVTQNKHTERSFSNEYWDNFQPGIYVDVTTGEPVFSSNDKFESGCGWPSFTKPIIKDVVHYETDNSFNMQRTEVLSRAGNAHLGHVFDDGPKDKGGLRYCINSASIKFIPLAEMEKAGYGYLIQSIKK

SEQ ID NO: 3113 - DNA, 450 bp, Haemophilus influenzae
gtgaaacagttatttgcaagagcatcaattataggggtagcgttattactttcagcttgtgcaaccgttcctatggcttctgttgaagaaagtaataccgccaaacaattcagatctcccgaaaaaggaaattcaggattatatatctaccgtgattcttttataggaaaagctttaaagaaagatctctatattgacgataaatttataggtgagtctgctcctgatgtatttttttataaaaccattaaagcgggagagcataaaatttcaactgaatccgaattcagtaataatgatttaaacattaaaactgaaagtggtaaaaactattttattcgtcaatatattaaatttggtgtatttgtaggcggtgcaaatttagaacaagtttctgaagaagaaggtaagaaggctatttctaaactaaatatggcagtaagtcattaa

SEQ ID NO: 3114 - protein, 149 aa, Haemophilus influenzae
MKQLFARASIIGVALLLSACATVPMASVEESNTAKQFRSPEKGNSGLYIYRDSFIGKALKKDLYIDDKFIGESAPDVFFYKTIKAGEHKISTESEFSNNDLNIKTESGKNYFIRQYIKFGVFVGGANLEQVSEEEGKKAISKLNMAVSH

SEQ ID NO: 3115 - DNA, 543 bp, Haemophilus influenzae
atgaaaaaattacttattgtaactatgttatttactttagcactatcagctcaagctcaatggtatgttcaaggcgatttaggtgcttcaaaaattgatattactgatttaaatagttcagacagtccatcttttacccaacgaattagtgttggctatgcttttgataagaactttcgtttagccgtagattatacaaactacggaaaagtaactgcaaattatgctgatgttgtagatgtatctcttaaaggtaaatcattaggcctcactggtttttatgattttgacttagccgatttcaaaccttatgttggtgtccgtgtatctaccaatggagcagatgtaactgcaaatgcaaatgcaagatattatcgcatagaagcttttgcaaccgaaacgagaataggcattggtgcattagctggtgttcaatataaattaactgataacgtggcacttaatactaatattgaatataaccgtttagcctcaaatgtttctgatgtgggcgttaaggctggtttacgttttagtttctaa

SEQ ID NO: 3116 - protein, 180 aa, Haemophilus influenzae
MKKLLIVTMLFTLALSAQAQWYVQGDLGASKIDITDLNSSDSPSFTQRISVGYAFDKNFRLAVDYTNYGKVTANYADVVDVSLKGKSLGLTGFYDFDLADFKPYVGVRVSTNGADVTANANARYYRIEAFATETRIGIGALAGVQYKLTDNVALNTNIEYNRLASNVSDVGVKAGLRFSF

SEQ ID NO: 3117 - DNA, 384 bp, Haemophilus influenzae
atgggaatgcacgataaaattcgtatgatgagagagcttcgtcaattatcgcaagaagatatggctgagaaaatgaatatgtcgccaagtggttatgccaagattgaacgaggtgaaactcgcctacaatacgataaattagtgcaaattgctcagatatttaatatgaatttgtctgacctagtggatgagaatagagggattatatttttattaaatgaaaatggaaataatacatcaactaactattatggaaataacgactctttaataattgaaattgaaaaattaaaattaacactttttcataaaaatgaattattagagcagaaagaaaaagaattagaaatgcttagaaaaatgatttcattattagaaaagtga

SEQ ID NO: 3118 - protein, 127 aa, Haemophilus influenzae
MGMHDKIRMMRELRQLSQEDMAEKMNMSPSGYAKIERGETRLQYDKLVQIAQIFNMNLSDLVDENRGIIFLLNENGNNTSTNYYGNNDSLIIEIEKLKLTLFHKNELLEQKEKELEMLRKMISLLEK

SEQ ID NO: 3119 - DNA, 546 bp, Haemophilus influenzae
atgaatgttatttctgatcttgagcttcagcaaattcgcactcaaatgctgacatttgcacaattgcaagtaaatcaagccgatcttgctgaagatttagtacaagaagcttttttaagtgcattcaaaaatctcgctaattttaagcgtcaatctgcatttaagacttggatttttgcgattcttaaaaataagattattgattatttacgtcagaaagggcggtttgttttagaaagtgaacttgaagatgaaaatactaataattcattttttgatgaaaaggggcattggaaaccagaatatcacccgagtgagttacaaggcgaagaagaaacggtttattccgatgaattttggctgatttttgaaagctgtttgacttgtttacctgctaaacaggcaaaaatttttatgatgcgagagtttttagagctttcatctgaagaaatttgtcaagaaacacatttaacttcgtctaatttacataccaccctttatcgggcgcgtttacagttgcaaaactgtctttcaaaaaaactttag

SEQ ID NO: 3120 - protein, 181 aa, Haemophilus influenzae
MNVISDLELQQIRTQMLTFAQLQVNQADLAEDLVQEAFLSAFKNLANFKRQSAFKTWIFAILKNKIIDYLRQKGRFVLESELEDENTNNSFFDEKGHWKPEYHPSELQGEEETVYSDEFWLIFESCLTCLPAKQAKIFMMREFLELSSEEICQETHLTSSNLHTTLYRARLQLQNCLSKKL

SEQ ID NO: 3121 - DNA, 324 bp, Haemophilus influenzae
atggatgatggcgatacacaaactttacaaactgcaaatcaatataccgatctcaaattaggcacgttacaaactcaaatgaataatttccaatcaggctttaacgagttaaatggcaaattagggaaattggacagcaaattagaacgtggtttagcagcggctaacgccctttctggtttagtgttacctcaagtggttggaaaagcgagtttttctgcagcggtgggcggttatggcatccgtaatgcggtggcaattggtgtcggctacacaccaagcaaatatcacgttaaaaagcggtatcaattattcttttcttaa

SEQ ID NO: 3122 - protein, 107 aa, Haemophilus influenzae
MDDGDTQTLQTANQYTDLKLGTLQTQMNNFQSGFNELNGKLGKLDSKLERGLAAANALSGLVLPQVVGKASFSAAVGGYGIRNAVAIGVGYTPSKYHVKKRYQLFFS

SEQ ID NO: 3123 - DNA, 156 bp, Haemophilus influenzae
atgttttattacaattctgcaagcaagcaagcaagcaagcaagcaagcaagcaagcaagcaagcaagcaagcaagcaagcaagcaagcaagcaagcaagcaagcaagcaatgctaatcttttcttttcatctgtcaagctaaccacgacagcttaa

SEQ ID NO: 3124 - protein, 51 aa, Haemophilus influenzae
MFYYNSASKQASKQASKQASKQASKQASKQASKQASNANLFFSSVKLTTTA

SEQ ID NO: 3125 - DNA, 129 bp, Haemophilus influenzae
gtgcaaattccaatatttaactttaaaatacttgcctctgaacaaacattcattataaataaaagtcacaatatttattttataaataaaaaagtgcggttaaaatcatccgcactttttagttcgtag

SEQ ID NO: 3126 - protein, 42 aa, Haemophilus influenzae
MQIPIFNFKILASEQTFIINKSHNIYFINKKVRLKSSALFSS

SEQ ID NO: 3127 - DNA, 1365 bp, Haemophilus influenzae
atgtttaaaatgaaaaatatcacgcttgctttgttgatgtctagtgcattagtgggatgtgccaatattggcgattcttatcaagctagccttgaagattacaagcaatatgaagaaattaccaagcaatataatgtaaaagaaaattggtggtcgttatatgatgatgcgcaattaaatcgcgtagtagaacaagcattaataaacaacaaagatttagctaaagcagccgtggcggtaaaccgtgcgctttacagtgcaaatttagtgggcgcaaatttagtgcctgcatttaatggttcaacttcatcagcagcacaacgccgagttgatatcagtacaaactccgccatttcacacaaaggttctttaaatgtgagctatacattagatctgtggcaacgtttggccaatactgttgatgcggcggaatggtcgcacaaagcaactgcagaagatatggaatcggctcgtttatcattaatcaattctgtagtaacaacttattatcaaattgcttatttaaatgatgcaattagcacaaccaacgaaacgatcaaatattacacggatattggcaatattatgcaaacgcgtttagcgcaaggcgtggctgatgcagccagcgttgatcaagcacaacaagccatattaacggcacgtaataacaaattaaattttgaaacccaacgcaaaacagcagaacaaacactgcgtaatcttctcaacctaaaaccaaatgaagcattaaatatcacgttccctcacattatgaatgtgaaaacggcaggcgtaaacttaaacgtgcctgtgtctgtaattgcaaatcgtcctgatgtaaaagccgcgcaattccgtttaagcagtgcattcaaaaatgccaaagcaactcaaaaaagttggttcccagaggttaatttaggtgcaagcctttcttcaacagcaagcacggttggtacggcgttacataaccctgtggctgctggcacagtcggaattagcctaccgttcttaaattggaacaccgtaaaatggaacgttaaaatttctgaagcagactatgaaacggcacgtttaaattacgaacaacgtattaccacagctctcaataatgtggataccaactatttcgcatttacccaagcgcaaagtacattaagtaatttacagcaaacccatagttacaatcagcgtatcacacaatattatcgaaaccgctataatgcgggcgtatccgaattgcgcgaatggttagttgcagccaatacggaaaaatcatcacaacttgcgattttgaatgcaaaatatcaagtgctgcaaagtgaaaatgcggtatatagctcaatggcgggatattatttgtaa

SEQ ID NO: 3128 - protein, 454 aa, Haemophilus influenzae
MFKMKNITLALLMSSALVGCANIGDSYQASLEDYKQYEEITKQYNVKENWWSLYDDAQLNRVVEQALINNKDLAKAAVAVNRALYSANLVGANLVPAFNGSTSSAAQRRVDISTNSAISHKGSLNVSYTLDLWQRLANTVDAAEWSHKATAEDMESARLSLINSVVTTYYQIAYLNDAISTTNETIKYYTDIGNIMQTRLAQGVADAASVDQAQQAILTARNNKLNFETQRKTAEQTLRNLLNLKPNEALNITFPHIMNVKTAGVNLNVPVSVIANRPDVKAAQFRLSSAFKNAKATQKSWFPEVNLGASLSSTASTVGTALHNPVAAGTVGISLPFLNWNTVKWNVKISEADYETARLNYEQRITTALNNVDTNYFAFTQAQSTLSNLQQTHSYNQRITQYYRNRYNAGVSELREWLVAANTEKSSQLAILNAKYQVLQSENAVYSSMAGYYL

SEQ ID NO: 3129 - DNA, 432 bp, Haemophilus influenzae
atgaaaaaattaacattagcattggttttaggttcagctttagccgtgacaggttgttttgataagcaagaagcaaaacaaaaagttgaggatacgaaacaaactgtagcatcagtcgcatcagaaacaaaagatgctgcagctaatacaatgactgaagtaaaggaaaaagcacagcagctttctacagacgtgaaaaataaagtagcagagaaagtggaagatgcgaaagaagtaattaaatcagcaacagaaacagcatcagaaaaagcaactgaaataaaagaggcggtttcagaaaaagcaagtgagatgaaagaagcagcatcagaaaaagtaggcgaaatgaaagaaaaagcaactgaaatgaaagaggcggtttcagaaaaagcaactcaagcagtagatgcagtgaaagaagcgacaaaataa

SEQ ID NO: 3130 - protein, 143 aa, Haemophilus influenzae
MKKLTLALVLGSALAVTGCFDKQEAKQKVEDTKQTVASVASETKDAAANTMTEVKEKAQQLSTDVKNKVAEKVEDAKEVIKSATETASEKATEIKEAVSEKASEMKEAASEKVGEMKEKATEMKEAVSEKATQAVDAVKEATK

SEQ ID NO: 3131 - DNA, 534 bp, Haemophilus influenzae
atgaattttaaattaagcttagtttacaccgcactttttgctgggatttctgtttctgcgttagcagaaacgcaacataaagctaatactgaaacgattgaacaaattaatgttcaagatacaggtattaaacaaaatggttatcaaacaacagggacatccgtcgtatcaaaagctgaagtgccagtattcgacacgccaaacacagtaaatattctttcaactaaactactagaagatcgcaaacctgaatcactcattgatgcgctttataacgtcagtggtgtgagccaagcgaatacgttaggtggtatgtttgatgctatccaaaaacgtggttttggtagaaaccgtgacaactcaattatgcgtaacggtttacaagctggcccagctaaaaactttagcgcgacaactgaaaccgttgaagttttaaaaggacctgcatctgtactttatggtattcaagatccaggtggtgtagttaatatcattttatcctgcaactattgctcaattattatgggatggtaa

SEQ ID NO: 3132 - protein, 177 aa, Haemophilus influenzae
MNFKLSLVYTALFAGISVSALAETQHKANTETIEQINVQDTGIKQNGYQTTGTSVVSKAEVPVFDTPNTVNILSTKLLEDRKPESLIDALYNVSGVSQANTLGGMFDAIQKRGFGRNRDNSIMRNGLQAGPAKNFSATTETVEVLKGPASVLYGIQDPGGVVNIILSCNYCSIIMGW

SEQ ID NO: 3133 - DNA, 624 bp, Haemophilus influenzae
gtgggtcgccaacgtggtgcgggcttaggtggcggacacgatgagcgtgaacaaaccttaaaccaaatgctggttgaaatggatggctttagcggtaatgacggcgtaattgttattgcagcaactaaccgtccagatgtgcttgatccagctttaacccgtccaggccgttttgaccggcaagtagttgttggcttacctgatgtgaaaggtcgtgagcaaatcttaaaagtgcatatgcgtaaagtgtctgttgcgcaagatgttgatgcaatgacgttagcgcgtggtacgccgggctattctggtgcagatttagcaaatttagtcaatgaggcggctttgtttgctgctcgagtgaataaacgtacggtaaccatgcttgagtttgaaaaagcgaaagataaaatcaatatggggccagagcgtcgcactatgattatgacggataagcaaaaagaatccactgcttatcatgaagcaggtcacgccattgtggggtatttagtgcctgaacacgatcctgttcacaaagtgacgattattcctcgaggacgtgccttgggtgtgacattcttcttacctgagggcgatcaaattagtattagccaaaaacaaaattag

SEQ ID NO: 3134 - protein, 207 aa, Haemophilus influenzae
MGRQRGAGLGGGHDEREQTLNQMLVEMDGFSGNDGVIVIAATNRPDVLDPALTRPGRFDRQVVVGLPDVKGREQILKVHMRKVSVAQDVDAMTLARGTPGYSGADLANLVNEAALFAARVNKRTVTMLEFEKAKDKINMGPERRTMIMTDKQKESTAYHEAGHAIVGYLVPEHDPVHKVTIIPRGRALGVTFFLPEGDQISISQKQN

SEQ ID NO: 3135 - DNA, 405 bp, Haemophilus influenzae
atggtaacgcaatggggattctctgaaaagttaggtccgattctttatacggaagatgagggcgaggttttcttaggtcgttcaatggcgaaagcgaaacatatgtcagatgaaaccgctcatgcaattgatgaagaagtgcgtgcaattgtaaatcgtaactatgcgagagcaagagagattttgaacgacaatatggatattcttcatgcgatgaaagatgcattagtcaaatatgaaaccattgaagaagagcaaattaaacaattgatgaatcgcgaacctgttacaccgccatcaggttggggagagccgaaaactcagcaggctgcttatgcaaattcaacaacgaatgatacaaagcccgaaagtgcggtagaaaataccgatgattttaatgtttaa

SEQ ID NO: 3136 - protein, 134 aa, Haemophilus influenzae
MVTQWGFSEKLGPILYTEDEGEVFLGRSMAKAKHMSDETAHAIDEEVRAIVNRNYARAREILNDNMDILHAMKDALVKYETIEEEQIKQLMNREPVTPPSGWGEPKTQQAAYANSTTNDTKPESAVENTDDFNV

SEQ ID NO: 3137 - DNA, 828 bp, Haemophilus influenzae
atgaaactttacgcaaataataaatgtcttgatttaagcgagcctcaaattatggggattcttaattttacgcctgattctttttctgatagcggacagttttttagtctagataaagcactttttcaagtggaaaaaatgctagaagagggggcaacaattattgatattggtggagaatccactcgtccgaatgcggatgaagtttctgaacaagaggaattgcatcgtgttgtgccagtagtggaggcggtgcgaaaccgttttgattgctggatttctgttgattcctcaaaagcaattgtgatgcgtgaagtggcaaatgttggaatggatttgattaatgatattcgcgctttgcaagagccaaatgccttagaaacggcagtaaaactggctttacctgtttgtattatgcatatgcaagggcaacctcgcacgatgcaagcaaatccttattatgaaaatgtcgtgcaagatgtattggcttttttacaaaaacgtactaatgaatgtctttttgctggcattaaaaaagaaaatttaatttgggatatgggctttggctttggcaaatctgtacagcataattatcaattattacaaaatctgaatgaattttgtaagaatggctatccagtattagcgggattatctcgcaaatcaatgattggtgcagtgcttgataaacctgttgatcaaagaataattggcagtgcggcaggcacgcttattgcagcgcaaaaaggtgcaaaaattttacgcgtacatgatgttgctgcaacatcagatatgctcaaagtttggcaggcaacagaaaatgcctga

SEQ ID NO: 3138 - protein, 275 aa, Haemophilus influenzae
MKLYANNKCLDLSEPQIMGILNFTPDSFSDSGQFFSLDKALFQVEKMLEEGATIIDIGGESTRPNADEVSEQEELHRVVPVVEAVRNRFDCWISVDSSKAIVMREVANVGMDLINDIRALQEPNALETAVKLALPVCIMHMQGQPRTMQANPYYENVVQDVLAFLQKRTNECLFAGIKKENLIWDMGFGFGKSVQHNYQLLQNLNEFCKNGYPVLAGLSRKSMIGAVLDKPVDQRIIGSAAGTLIAAQKGAKILRVHDVAATSDMLKVWQATENA

SEQ ID NO: 3139 - DNA, 1338 bp, Haemophilus influenzae
atggtaaatcgtaaatattttggaacagatggtgtacgtggaaaagtaggtgcttacccaattacaccagatttcgcattaaaattaggttgggctgcgggaaaagtattagcttcccaaggttcgaaaatggttttaatcggtaaagacacccgaatttctggatatatgttggaatcagccctcgaagcaggtttggctgctgcggggttatctgctgcatttaccggccctatgccgacacctgctattgcttatttaaccagaactttccgagctgaagcaggtattgtgatctcagcctctcataatccttattatgataatggcattaaattcttttcagcaaaaggcactaaattacctgatgaaattgaagaagccattgaagcaatgttagaacaacctatggattgtgtggaatctgccgaattaggtaaagcaagccgtattaatgatgcaacaggacgctacattgagttttgtaaagggacattcccagcacacttaggcttggagggttataaaatcgtggtagattgtgcaaatggtgcaacctaccatattgcgcctaacgtgtttagagagctaggtgcggaagttattgaaattggtacggatccaaatggtttaaatattaatgaaaaatgtggtgcaactgatgtaactgcattgcaagctaaagtagttgaaatgaaagctgatgttggcttagcttatgatggcgatggtgaccgcattatgatggtcgatcatttaggaaataaagtcgatggcgaccaaattctctttattattgcgcgtgaagcattgcgctcaggtcaattaaaaggcggtgtcgttggcaccttaatgagtaatatgagcttagagattgcgttgaaaatgcttggtgttcccttcttacgtgcaaacgtgggagaccgttatgtattggaaaaaatggttgaaaatgattggacgcttgggggggagaattctggacatattatcattgcggataagaatacaactggcgatggcattgttgcgtcattggctgtattggcggcgatggcacagcataaattatcattaaatgaattagcaagtgcggttaaattattccctcaagtgttaatcaatgtacgttttgcgggtggggaaaatccacttgaaagtgatgctgtaaaatctgttgccgcagaggttgaaaaacgtttagaaggtaaaggtcgtattttattgcgtaaatcgggtacggaaccacttattcgcgttatggtggaatgccaagatgctgaacttgcacaacaatgtgcagaagaaattgcagaagccgtgaaaaaaattaattaa

SEQ ID NO: 3140 - protein, 445 aa, Haemophilus influenzae
MVNRKYFGTDGVRGKVGAYPITPDFALKLGWAAGKVLASQGSKMVLIGKDTRISGYMLESALEAGLAAAGLSAAFTGPMPTPAIAYLTRTFRAEAGIVISASHNPYYDNGIKFFSAKGTKLPDEIEEAIEAMLEQPMDCVESAELGKASRINDATGRYIEFCKGTFPAHLGLEGYKIVVDCANGATYHIAPNVFRELGAEVIEIGTDPNGLNINEKCGATDVTALQAKVVEMKADVGLAYDGDGDRIMMVDHLGNKVDGDQILFIIAREALRSGQLKGGVVGTLMSNMSLEIALKMLGVPFLRANVGDRYVLEKMVENDWTLGGENSGHIIIADKNTTGDGIVASLAVLAAMAQHKLSLNELASAVKLFPQVLINVRFAGGENPLESDAVKSVAAEVEKRLEGKGRILLRKSGTEPLIRVMVECQDAELAQQCAEEIAEAVKKIN

SEQ ID NO: 3141 - DNA, 453 bp, Haemophilus influenzae
atgaacatttttattatgcgtcatggcgaagcggaagtaatggctgatagcgataaagctcgtcgcttaactgcttatggtattaaacaagctttttctcaaggagaatggttaaaacagcatttgagtacattattaattaattcactagaccgtattttagtgagcccttatgtcagagctcaagaaacctttcatcaagttaatcaagcgtttgatttggagttagaaaataaatttgaaatttgggaggggattacgccttatggccatgcgcattcagtcattgattatttagaagtgctaaaagacgagggcgttaaatctgtattgattgtttcccatttgcccttagtgggagaaattgttgctgaactgtatggaaaacgaaatccaatatcattactaaaaaaccacaacaaacgccacgttatgtcgttagtggaaccttag

SEQ ID NO: 3142 - protein, 150 aa, Haemophilus influenzae
MNIFIMRHGEAEVMADSDKARRLTAYGIKQAFSQGEWLKQHLSTLLINSLDRILVSPYVRAQETFHQVNQAFDLELENKFEIWEGITPYGHAHSVIDYLEVLKDEGVKSVLIVSHLPLVGEIVAELYGKRNPISLLKNHNKRHVMSLVEP

SEQ ID NO: 3143 - DNA, 1428 bp, Haemophilus influenzae
gtgaaaaatacgacttacgccccctctctttcttgggaaaatgataaaactaaagtgcttctttcttatgaacacaaagatattcttgagccatttgatcgtggtacaaatcttttaacggcaactaatgcattaccagatattcctgtatcgcgtcgtttagatgagccaaataatgaaaccacggcaaaaaccgataacatcgatttcaaaattgaacacaaattaagtgacagttggaaattaaattttggctatagctacgcacgttataaatatttctataatcaagcccgaattaaagatattaatgtatcaaatattaatcaaccaaaaaaactcaataaaaacaaaattacagcacttgaattaactgctcgtagcgcaactcgagatattgagcaacaaactggagagcaacgtatccatagtgtttctttaaacacagtcggggaatttgctattggagatattgcgaatcgctttgttgtgggcacagatcttatgagaaataaaatggatttaggaccaatttataatactagagacataaatgatggtaaggttattaatattgacaacccaaattataccaatccagtggcaataaagaaaaatgaaaataacaatgcctaccaatttaatcacttaaaaactttaggtctttatattcaaaataccacttattttacagataactttattataacgggaggacttcgttatgaatattttgatcaagttgttggtcgatcaacattaaagaatattagaagtggatatctggctcaaaaagacgggaaacttctctatcagttaggtagtgtttataaatttactccaaatattgcaacattttttaaccatgcagaatcattccgtccacaaaataatagaacgcttattattaatggcgaacttcctgctgaacagggtaaatcttttgaaacaggtctaaaatatgagaatgcatatttaaatgcaactgtagctttatttaatataaacaaacgtaatgttgcagaaacagttaatgttaatggcacaaatgaactacaaattgttggaaaacagcgttctcgtggcattgagtttgatctaaatggacaacttactgataatttaagtattgcagcaaactatacttacacaaaagtaaaaaacctagaaaatcacaacaataaattagctgttggtaaacaactttctggcgtaccaaaacatcaatcatcattattcttagcctataatatcggcgaatttgattttggtaatattcgtgtcggtggaggtgcgcgttatttaggttcttggtatgcctataataatacttataaaaagcgtataaacttccacaggctattgtttatgatgcatttattgcctatgacacaaaaatttcagggaaaaaagtatcctttcagttaa

SEQ ID NO: 3144 - protein, 475 aa, Haemophilus influenzae
MKNTTYAPSLSWENDKTKVLLSYEHKDILEPFDRGTNLLTATNALPDIPVSRRLDEPNNETTAKTDNIDFKIEHKLSDSWKLNFGYSYARYKYFYNQARIKDINVSNINQPKKLNKNKITALELTARSATRDIEQQTGEQRIHSVSLNTVGEFAIGDIANRFVVGTDLMRNKMDLGPIYNTRDINDGKVINIDNPNYTNPVAIKKNENNNAYQFNHLKTLGLYIQNTTYFTDNFIITGGLRYEYFDQVVGRSTLKNIRSGYLAQKDGKLLYQLGSVYKFTPNIATFFNHAESFRPQNNRTLIINGELPAEQGKSFETGLKYENAYLNATVALFNINKRNVAETVNVNGTNELQIVGKQRSRGIEFDLNGQLTDNLSIAANYTYTKVKNLENHNNKLAVGKQLSGVPKHQSSLFLAYNIGEFDFGNIRVGGGARYLGSWYAYNNTYKKRINFHRLLFMMHLLPMTQKFQGKKYPFS

SEQ ID NO: 3145 - DNA, 1335 bp, Haemophilus influenzae
atgaactggcaaaccgaacttaataatagtttaaactggattttaaccgcacttttttgggtgatattgtgctttagtgtaacaatgttagccttaaaacaaactactttcggcaaaaaattctggtgtattgtctctccatcaatggataaaaaaacaagcattaaactaattttaatgttgttagtactatttataatgatattgttggaagtacgatttagtgtacttaattcatttttttacaatggattgtatagctcaatgcaagaattaaatattgagaaattttggttctttgcaaaactaaatgccctccttgtggtagcacaagttatacatgccattgctgattacttctttcaacaagtatttgaaattcgttggttggaaagctttaatgcaacacttgttaaacgctggctaaataagaaaaaatactatcgcctaaaatatgaacgagatttaccggataatatcgatcaacgtatcgaacaagatgcgagagaatttattaccagtacagtacaaattgtgcgaggcgtgattaactcggtgctcacgaccattgaatttacgattattttatggtcactttccggcgtattaactttattcggatttaatatcgaaaaaggcgttgttttcttcatttatgcctttattatttttgcaacactcatgtctgtttggattggtcgccctctaattaagctgaattttacgaaagaaaaactcaatggcgattatcgttattccttaatccgtgtacgagacaatgcagaaagcattgctttttataatggcgagccaaaagaacaaactttcttacaacatcaattccgtcaaattattcataaccgttggtccattgtattaaaaatgttgggcttaaatagtttcaactctggagtaactcgcgtggccaaattattgcctttaatgttacaagcaccacgtttcttttctggacaaataaaactaggagatatgcatcaaacagtccaagcatttaaccgattaatgaccgcactttcattcttccgcttgttctatgagcaattcacactctatcaagctcggttaaatcgtctttatggttttataacaaaaatggatgaattagataaacaaaacgttcatcatccttttcattgctctcatcgtgtcgccttaaaaaatttcggtattaaagatgaacaaggtcatgtactactcaataatttaaatattaatttagaaaatggagatgccctattaattcaaggtgcatctggaacaggaaaaacatcgctactaaaagcaattgcaggaatctatcctttgaaaccatag

SEQ ID NO: 3146 - protein, 444 aa, Haemophilus influenzae
MNWQTELNNSLNWILTALFWVILCFSVTMLALKQTTFGKKFWCIVSPSMDKKTSIKLILMLLVLFIMILLEVRFSVLNSFFYNGLYSSMQELNIEKFWFFAKLNALLVVAQVIHAIADYFFQQVFEIRWLESFNATLVKRWLNKKKYYRLKYERDLPDNIDQRIEQDAREFITSTVQIVRGVINSVLTTIEFTIILWSLSGVLTLFGFNIEKGVVFFIYAFIIFATLMSVWIGRPLIKLNFTKEKLNGDYRYSLIRVRDNAESIAFYNGEPKEQTFLQHQFRQIIHNRWSIVLKMLGLNSFNSGVTRVAKLLPLMLQAPRFFSGQIKLGDMHQTVQAFNRLMTALSFFRLFYEQFTLYQARLNRLYGFITKMDELDKQNVHHPFHCSHRVALKNFGIKDEQGHVLLNNLNINLENGDALLIQGASGTGKTSLLKAIAGIYPLKP

SEQ ID NO: 3147 - DNA, 414 bp, Haemophilus influenzae
atgggaagtttattcctgccacaacgaccttatatgccgcagggtactttacgagaagcaatttgttatccaaatatcaatccaagtcacgcagaattggaacaaaccatgaaggattgtgcgctaggaaaatatatacacgcacttaatgtaaaaaatgactggcaagcgattttatcgcccggcgaacttcaaagagtggcgtttattcgtattttactcacaaaaccagatgtcgtatttctcgatgaaacgacttcagcattggatgaaataaccgagaatttactctaccaaacaattaaagagcgtttgcccgaaatgatcattctcagcgtaggtcatcgtagcacattacagcaatttcataacaaacagttaaaattagatgtatgtttattatgtgaaaattag

SEQ ID NO: 3148 - protein, 137 aa, Haemophilus influenzae
MGSLFLPQRPYMPQGTLREAICYPNINPSHAELEQTMKDCALGKYIHALNVKNDWQAILSPGELQRVAFIRILLTKPDVVFLDETTSALDEITENLLYQTIKERLPEMIILSVGHRSTLQQFHNKQLKLDVCLLCEN

SEQ ID NO: 3149 - DNA, 270 bp, Haemophilus influenzae
atgtctctaagtactgaaaaaaaagcagcaatcgttgctgaatttggtcgtgatgcgaaagataccggttcttctgaagttcaaatcgcattattaactgcacaaatcaaccacttacaaactcacttcgcagagcacaaaaaagaccaccatagtcgtcgtggtttattacgtatggtttctcgtcgtcgtaaacttttagactacttaaaacgtactgatcttgctttataccaaagcactatcgctcgtttaggtttacgtcgctaa

SEQ ID NO: 3150 - protein, 89 aa, Haemophilus influenzae
MSLSTEKKAAIVAEFGRDAKDTGSSEVQIALLTAQINHLQTHFAEHKKDHHSRRGLLRMVSRRRKLLDYLKRTDLALYQSTIARLGLRR

SEQ ID NO: 3151 - DNA, 780 bp, Haemophilus influenzae
gtggaatcaattactgtttttagtgcaggtagtttttgttatgctctgcaagaattatctgatatttttcgacaaattcatcatatagagattaaagcattttgtggtccagccggaatcttgcgtcaacaaattgagcaagggaatagaggtgatatttttattagtgcaaatcctggaaatgtgcttcaattagctgattctaaaaaaatttatcaaaaattaacgatagcctttaatcaattagcattaactacgttaaatttagaacacttccgtcataaatccatttttgaattgctatttgatcgctctttacgcctcgcaacatcaacgccatcttgtgatccttgtggagattatacttggcggttatttgataaaattgagcaatgttttcctggtgaaggggaggcattgaaacgacgagcgttgaaattagtaggcggtacttcttcaaatatagttccaaaagggaaaattgcatctcattatttattattaaatagttatgctgatatgatgatcggttatgcacattatcaattaagatctgaagttaagccaagtaagtacgatgcatctataaatacaaattctagtattactgtgaataatcaaacatttttgactcatatgttccctattgaatttgaggtaaaagctgaatatgtcatggctttattaagcaatgttgaaagtgcggttaaattttttgaatttttacggtctaataaagctaaagaaatcattaagaatcatggttttttactagaataa

SEQ ID NO: 3152 - protein, 259 aa, Haemophilus influenzae
MESITVFSAGSFCYALQELSDIFRQIHHIEIKAFCGPAGILRQQIEQGNRGDIFISANPGNVLQLADSKKIYQKLTIAFNQLALTTLNLEHFRHKSIFELLFDRSLRLATSTPSCDPCGDYTWRLFDKIEQCFPGEGEALKRRALKLVGGTSSNIVPKGKIASHYLLLNSYADMMIGYAHYQLRSEVKPSKYDASINTNSSITVNNQTFLTHMFPIEFEVKAEYVMALLSNVESAVKFFEFLRSNKAKEIIKNHGFLLE

SEQ ID NO: 3153 - DNA, 762 bp, Haemophilus influenzae
atgaataaagcgctctccgtggaaaatctaggtttttattaccaagcggaaaacttcctgtttcagcaactgaattttgatttgaataaaggagatattctggcgattttagggcaaaacggttgcggaaaaagcaccttgttggatttgttgcttggcattcatcgcccgattcagggcaagattgaggtgtatcaatctatcagttttgtgccgcaattcttttcttcgccttttgcttattccatattggatattgtgctgatggggcgctcaacccatattaatacttttgccaaaccgaaaccgtatgattatcaagtcgccatgcaggcactggattatttgaacttgacccatttggcaaagcgcgaatttacttcgctttcgggcgggcagcgacaactaattttaattgcgagagccattgcttcagaatgcaaattgatactgttggatgagccaacttcagcattagatcttgcaaatcaagatatcgtattgtctttacttatcgatttggcacaatcacagaacatgactgtcgtattcacaacacatcaacctaatcaagctgtagcgatagccaataaaactttattgttaaataaacaaaattttaaatttggcgaaacaaggaatattttaacctcagaaaatttgaccgcactttttcatttaccgatgtttgaacaacaagctcaatataaagaatctttttttacgcattttgttcccttgtataaaacgttattaaagtaa

SEQ ID NO: 3154 - protein, 253 aa, Haemophilus influenzae
MNKALSVENLGFYYQAENFLFQQLNFDLNKGDILAILGQNGCGKSTLLDLLLGIHRPIQGKIEVYQSISFVPQFFSSPFAYSILDIVLMGRSTHINTFAKPKPYDYQVAMQALDYLNLTHLAKREFTSLSGGQRQLILIARAIASECKLILLDEPTSALDLANQDIVLSLLIDLAQSQNMTVVFTTHQPNQAVAIANKTLLLNKQNFKFGETRNILTSENLTALFHLPMFEQQAQYKESFFTHFVPLYKTLLK

SEQ ID NO: 3155 - DNA, 948 bp, Haemophilus influenzae
atgcagccagatagctaccctaaaattctctttggcttaacgctgttgcttgtgattaccgccgtgatttctttgggaatagggcggtattctttgtctgtaccgcaaattggtcaaattctgtgggcaaaagcgaccgcactttgcgtgggtgccggtttggcattgagtggtgtggtattacaaggcatttttcgtaacccgttagtggatccgcatattatcggcgtgacctccggttcagccttcggtggcaccttggcaattttctttggattcagtttatacggcttatttgccagcactattttatttggcttcggcacgcttgccttggtttttctatttagcttcaaatttaatcaacgcagcttgttgatgcttattcttatcggcatgattttaagcgggcttttttcagccctagtgagcctattgcaatacatttccgacacagaagaaaaattgccaagcattgtgttttggttgatggggagttttgccacctctaactgggaaaaactcctctttttctttgtcccgtttttgctgtgtagctcgattttgctcagcttaagttggcgcttgaatttactgtctttagatgagaaagaagccaaggctttgggcgtgaaagtggccccattacgttggttagtgatctttttaagcggttcgttagtggcatgccaggtggcaattagcggcagtatcggctgggtcgggctgatcattcctcatcttagccgtatgctggtaggcgccaatcatcaacgtttattgccttgcaccatgcttgttggggcgacttatatgttgcttgtggacaatgttgcgcgttccctatccgatgccgaaattccaatcagtattttgaccgcacttattggtgcaccgttgtttggtgtattggtatataaactaaaacgcggaggcatgaatgaataa

SEQ ID NO: 3156 - protein, 315 aa, Haemophilus influenzae
MQPDSYPKILFGLTLLLVITAVISLGIGRYSLSVPQIGQILWAKATALCVGAGLALSGVVLQGIFRNPLVDPHIIGVTSGSAFGGTLAIFFGFSLYGLFASTILFGFGTLALVFLFSFKFNQRSLLMLILIGMILSGLFSALVSLLQYISDTEEKLPSIVFWLMGSFATSNWEKLLFFFVPFLLCSSILLSLSWRLNLLSLDEKEAKALGVKVAPLRWLVIFLSGSLVACQVAISGSIGWVGLIIPHLSRMLVGANHQRLLPCTMLVGATYMLLVDNVARSLSDAEIPISILTALIGAPLFGVLVYKLKRGGMNE

SEQ ID NO: 3157 - DNA, 1056 bp, Haemophilus influenzae
atgaaacttaaatcattgttaattgccggcttgctcagttccctttctttttcagcattagctgatcgcattattacagaccaactcgatcgcaaagtgacaattcccgatcacattaaccgagccgtggtgttacagcaccaaaccttgaatattgccgtgcagttggatgccacaaaacagattgtgggagtgctttccaactggaagaaacaactaggcaaaaactatgttcgccttgcaccggagctggaaaacatggcgatgccgggcgatttgaattccgttaatattgaaagtctgttggcgttaaaaccggatgtggtgtttgtgactaactacgcaccgtctgaaatgatcaagcaaatcagtgacgtgaatatccctgtggtagccatttccttgcgtactggtgaagtgggcgaaaaaggtaaacttaatccaaccttaactgacgaagataaagcttataatgacggcttaaaacagggcattgaactgattgccgaggtgtttgagaaaaaacaacaaggtgatgagttagtgaaagctgcctttgctaatcataagttgttggcagatcgcctaggcgacgtttctgccgataaacgtgtgcgcacttatatggcaaatccggatttaggcacttatggttccggtaaatatacggggcttatgatggaacatgcgggcgcttataacgtcgcagcggcaaccattaaaggtttcaaacaggtttctctagaaaatgtgttggaatggaatcctgcggtgattttggtgcaagatcgttatcctgatgtagtaccacaaattttgaacgatcaaggttgggcgaatattcaggcactgaaagataaaaaagtttttttgatgccggaatatgctaaagcctggggatacccgatgccggaagccttagcattgggcgaagtatggttggctaaagccctttatccgcaacgtttccaagacgtggatttggataaaatggtgaacgattattaccaaaaattctaccgcacttcttacaaacccgacaatgcagccagatag

SEQ ID NO: 3158 - protein, 351 aa, Haemophilus influenzae
MKLKSLLIAGLLSSLSFSALADRIITDQLDRKVTIPDHINRAVVLQHQTLNIAVQLDATKQIVGVLSNWKKQLGKNYVRLAPELENMAMPGDLNSVNIESLLALKPDVVFVTNYAPSEMIKQISDVNIPVVAISLRTGEVGEKGKLNPTLTDEDKAYNDGLKQGIELIAEVFEKKQQGDELVKAAFANHKLLADRLGDVSADKRVRTYMANPDLGTYGSGKYTGLMMEHAGAYNVAAATIKGFKQVSLENVLEWNPAVILVQDRYPDVVPQILNDQGWANIQALKDKKVFLMPEYAKAWGYPMPEALALGEVWLAKALYPQRFQDVDLDKMVNDYYQKFYRTSYKPDNAAR

SEQ ID NO: 3159 - DNA, 846 bp, Haemophilus influenzae
atgatttatttttcagataaagaattggatgatttattgcttgaggacatttatcgtggtgatttaaccactcatgcccttagtattgaaaatattccggcaaaaattctgtttaagcgtaaaaatgcaggggttgtggcgggtgtttctgttgcggaaaaattattaaaaaaactggatattcaaccgcacttatatgtaaaagaaggggattgggttgaatcaggtgctttgttgatcagtgcggaaggaatgtctgaacaattacatcaagcttggaaagtggtgcaattggtgcttgaatggtcgtgtggggttgctcaatatactgcagaaatgattgccaatgccaaatcggttaatccaaatgctgttgtggcttgcacgcgtaaaagtattcctaatacgcgtaaacttgcgacgaatgctgtattagccgctggtgggcatattcatcgccaaggcgttagcgaaactcttttggtttttactaatcatcgaaacttactttctgatccaaatgattggacgaaaattgtggatagattacgtcaagaagcacctgaaaataaaattactttagaagcagataattatgctcaatttgagcaaatgtatatggctgaacccgacattattcaactggataaatggttgttagaggatgtgaaaaaggctttagatctacttcaatcaaaacagaaagatattctgctttctgtcgctggaggagtaaataaaaataatgtatcagattacgccaaattgggtattcgtttatttatcacttctgcaccttattatgcaccgccagaagatataaaggtggtgattgaaaagatatga

SEQ ID NO: 3160 - protein, 281 aa, Haemophilus influenzae
MIYFSDKELDDLLLEDIYRGDLTTHALSIENIPAKILFKRKNAGVVAGVSVAEKLLKKLDIQPHLYVKEGDWVESGALLISAEGMSEQLHQAWKVVQLVLEWSCGVAQYTAEMIANAKSVNPNAVVACTRKSIPNTRKLATNAVLAAGGHIHRQGVSETLLVFTNHRNLLSDPNDWTKIVDRLRQEAPENKITLEADNYAQFEQMYMAEPDIIQLDKWLLEDVKKALDLLQSKQKDILLSVAGGVNKNNVSDYAKLGIRLFITSAPYYAPPEDIKVVIEKI

SEQ ID NO: 3161 - DNA, 600 bp, Haemophilus influenzae
atgttaatagttcagaatcttcaaactaatattttaaaatctatttctttttcaattgaaaaaagtgaatgcctttctgttgttggtgaatcaggtagcggaaaaacgactttattaaatgcgattgctggttatattgattattctggctctattttatggaataaccaagttctagaaaataatcctccgtggaagagaaattttcgttatttaaatcaacgactttatttgtttcctcataaaacggtacgaggaaatttaatacttgctaatccatcagcatctgatgctgaacaacagatattattatctgaattaaaaatagatcatcttattaatcgctatcctcatcagttgtccggtggagaacaacagcgtgtagctttagcaagggcactaatttatcgtcctgatttattacttttagatgagcctttttcttctttagattggtcttcccgtaaagatatttggaaagtgttaaaaaatttaattcaaacaaatgaaattacaacaattttagtaacgcatgagccaaaagaagccgagtatttttcaggtaagcagattcagttatatcagggtcaattaatttaa

SEQ ID NO: 3162 - protein, 199 aa, Haemophilus influenzae
MLIVQNLQTNILKSISFSIEKSECLSVVGESGSGKTTLLNAIAGYIDYSGSILWNNQVLENNPPWKRNFRYLNQRLYLFPHKTVRGNLILANPSASDAEQQILLSELKIDHLINRYPHQLSGGEQQRVALARALIYRPDLLLLDEPFSSLDWSSRKDIWKVLKNLIQTNEITTILVTHEPKEAEYFSGKQIQLYQGQLI

SEQ ID NO: 3163 - DNA, 543 bp, Haemophilus influenzae
ttgccttttcaatcattttttgacactttgtttgatttaccaatggttttgccaccattagtcacaggtctaagtttgcttctactttttagttcacaagggatattggctgaactgcttccttttataagtaaatggattttttcccctgcagggatcattattgctcagacttatattgcgagttcgattttattgcgtagcactcgcggtattttttcttcctttgaatcaggttatcgatttgcatcttatactcttgggttatcaccgtttaagactttaataaaaatagagattcctatgtgttggaagcctttggtttgtgcttcagttttagcttggtctcgcgcaataggggagttcggagccacattaatgttggcaggagcaacgcgatttaaaaccgaaactttacctatggcagtctatttgaatatttcaagtggtgattttgaaatcgctattggcgcatcattatggcttttatttatatctacatgtttgttgctagttttacggatgattaatagggctgtttag

SEQ ID NO: 3164 - protein, 180 aa, Haemophilus influenzae
MPFQSFFDTLFDLPMVLPPLVTGLSLLLLFSSQGILAELLPFISKWIFSPAGIIIAQTYIASSILLRSTRGIFSSFESGYRFASYTLGLSPFKTLIKIEIPMCWKPLVCASVLAWSRAIGEFGATLMLAGATRFKTETLPMAVYLNISSGDFEIAIGASLWLLFISTCLLLVLRMINRAV

SEQ ID NO: 3165 - DNA, 738 bp, Haemophilus influenzae
atgaaaaaattagttgcggtaacttcaatgattttaactacattttctgtacaagctgcagacttgtatttatatgctggggcgggactgaaggagcctgtggaaaaaattattcaccaatatgaacaagaaacaggaaataaagtaactgttgaatatggtggttctggacagattctagctcgttataacacggtaaaaagtggtgatctttttttagcgggttcagaggattatgtcacaaaattacagaaaactaatgatgtaaacaatatagggaccatagtattgcatgttccagttatggctattcgtaaagataaaatttcagggattgattcttttaaagcattagctgaaagctcattacgtttaggtattggtgatagtaaagcaatggctcttggtaaaggcgctgaaaaaatgtttgagttgtcaggatatcaaaagcaacttaatgataaagttgttgtgaaagctgcgacggtaaaacaattaatgctatatttattaaatggtgatgtagatgcagctgtagtaggtcgttcaggtgcttggaaagttcgagacaaggttgaattattaccaagtccaaaaggcacaccagaagaaaaagttactattggtctactttcttcttctaaatatccaaaagaagctcaacagttatttgatttctttaaatctcctcaaggcgtgaagtattttactgatgaaggtttcttaccggctaaataa

SEQ ID NO: 3166 - protein, 245 aa, Haemophilus influenzae
MKKLVAVTSMILTTFSVQAADLYLYAGAGLKEPVEKIIHQYEQETGNKVTVEYGGSGQILARYNTVKSGDLFLAGSEDYVTKLQKTNDVNNIGTIVLHVPVMAIRKDKISGIDSFKALAESSLRLGIGDSKAMALGKGAEKMFELSGYQKQLNDKVVVKAATVKQLMLYLLNGDVDAAVVGRSGAWKVRDKVELLPSPKGTPEEKVTIGLLSSSKYPKEAQQLFDFFKSPQGVKYFTDEGFLPAK

SEQ ID NO: 3167 - DNA, 1374 bp, Haemophilus influenzae
atgcttgatcgttattggttcggtgcaaccaaccgtatttcaccagaagcaccagtgccagtagttcgtgtacaagaaaatgaagaacgcccaggtggagctgcaaatgtggcgatgaatattgcttcactcaatgtacctgttcagttaatggggctgattggacaagatgagacaggttctgcactttcccacttattagaaaaacaaaagattgattgtaattttgttgcattagaaacccatccaaccattactaaattacgtgttttatctcgtcatcaacagctgctccgccttgattttgaagaagatttcaatcatgtagattgcaaggatttattatcgaagttagaaagtgcggtgaaaaattacggtgctttgattctttctgattacggcaaaggcacgcttaaagatgttcagaaaatgattcaaattgcacgcaaagcgaatgtgcctgtgttgatcgatccaaagggaactgattttgaacgttatcgtggggctacattattgacacccaatatgtctgaatttgaagccgttgtgggtaaatgtaatacagaagaagagattattgagaaaggtttaaaattaatttctgatattgaattaaccgcacttttggtgacgcgttctgaaaaaggcatgacattattacgcccaaatcaagaaccctatcatttgccaaccgttgcaaaagaagtgtttgatgtgacgggagccggtgacactgtcattagcgtattagcaaccgcattagcagatggacgttctttcgaagaatcttgttacctagccaatgttgccgcaggaattgtggtggggaaattggggacttcaacggtttcgaccgtggaacttgaaaatgcgattcatgctcgccctgaaactggatttggcattatgagtgaagcagaattaaaagatgctgtcgcacaagctaaagcacgcggtgaaaaaattgtgatgactaatggctgtttcgatattttgcatccagggcatatttcttatttagaaaatgcacgcaaattgggcgatcgtttaattgttgcggtaaacagcgacgattctgttaaacgcttaaaaggcgaaagtcgtccaattaataatcttgaaaaccgtatggcggtactggctggtttggcatccgtggactggttggtacctttcactgaagatacaccacaacgtttaatcggcgaaattctaccagatcttttggtcaaaggtggcgattacaaacccgaagagattgctggcgcaaaagaagtttgggcaaacggtggcgatgttaaagtgctaaactttgaaaatggttgttcaacaacaaacgtgattgaaaaaattaaattattgaaagattaa

SEQ ID NO: 3168 - protein, 457 aa, Haemophilus influenzae
MLDRYWFGATNRISPEAPVPVVRVQENEERPGGAANVAMNIASLNVPVQLMGLIGQDETGSALSHLLEKQKIDCNFVALETHPTITKLRVLSRHQQLLRLDFEEDFNHVDCKDLLSKLESAVKNYGALILSDYGKGTLKDVQKMIQIARKANVPVLIDPKGTDFERYRGATLLTPNMSEFEAVVGKCNTEEEIIEKGLKLISDIELTALLVTRSEKGMTLLRPNQEPYHLPTVAKEVFDVTGAGDTVISVLATALADGRSFEESCYLANVAAGIVVGKLGTSTVSTVELENAIHARPETGFGIMSEAELKDAVAQAKARGEKIVMTNGCFDILHPGHISYLENARKLGDRLIVAVNSDDSVKRLKGESRPINNLENRMAVLAGLASVDWLVPFTEDTPQRLIGEILPDLLVKGGDYKPEEIAGAKEVWANGGDVKVLNFENGCSTTNVIEKIKLLKD

SEQ ID NO: 3169 - DNA, 108 bp, Haemophilus influenzae
ttgccacacctagccaaaaaagccagtattttggggctaaaaagtgcggttgaaattgagggagtttttcgtttttcattgttctttccacgtaagttaggggcgtag

SEQ ID NO: 3170 - protein, 35 aa, Haemophilus influenzae
MPHLAKKASILGLKSAVEIEGVFRFSLFFPRKLGA

SEQ ID NO: 3171 - DNA, 822 bp, Haemophilus influenzae
ttgagccatattggtcatggtctcggttggctattttcacatttaaaagtgggtaaacgtcgagcagccattgcacgccgcaatcttgaactttgttttcctgatatgtctgaaaacgaccgtgaggcgattttgcaagaaaatcttcgttcagtaggcatggcaattatcgaaactggcatggcttggttttggtcggattcacgtatcaaaaaatggtcgaaagttgaaggcttacattatctaaaagaaaatcaaaaagatggaattgttctcgtcggtgttcatttcttaacgctagaacttggcgcacgcatcattggtttacatcatcctggcattggtgtttatcgtccaaatgataatcctttgcttgattggctacaaacgcaaggtcgtttacgctctaataaagatatgcttgatcgtaaagatttacgcggaatgatcaaagctttacgccacgaagaaaccatttggtatgcgcctgatcacgattacggcagaaaaaatgccgtttttgttcccttttttgcggtgcccgacgcttgcacaaccactggtagttattatttattgaaatcttcacaaaacagcaaagtgattccatttgcgccattacgcaataaagatggctcaggctataccgtgagtatttcagtgcctgttgattttacggatttacaagatgaaacagcgattgctgcacgaatgaatcaaatcgttgaaaaggaaatcatgaaggacataacgatatatatgtggctacatcgccgttttaaaacacgtccagatgaaaatacgcctagtttatacgattaa

SEQ ID NO: 3172 - protein, 273 aa, Haemophilus influenzae
MSHIGHGLGWLFSHLKVGKRRAAIARRNLELCFPDMSENDREAILQENLRSVGMAIIETGMAWFWSDSRIKKWSKVEGLHYLKENQKDGIVLVGVHFLTLELGARIIGLHHPGIGVYRPNDNPLLDWLQTQGRLRSNKDMLDRKDLRGMIKALRHEETIWYAPDHDYGRKNAVFVPFFAVPDACTTTGSYYLLKSSQNSKVIPFAPLRNKDGSGYTVSISVPVDFTDLQDETAIAARMNQIVEKEIMKDITIYMWLHRRFKTRPDENTPSLYD

SEQ ID NO: 3173 - DNA, 1944 bp, Haemophilus influenzae
ttgatagaattttctcaaattaaaaaattaacgaataatctcaccatgacaaccaattattcagctcaagaaattaccgttcttaaagatctcgaaccagtgcaaattcgcccaggaatgtacactgacactactcgccctaatcatttagcacaagaagttattgataacagcgtagatgaagcccttgcaggttttgccacaaaaattgaagtaattttgcacactgatcaatccattgaagtcacagacaatggtcgcggtatgcctgtggatattcatcctacggaaggcgtttctggcgtagaagtgatcctgactaaactgcatgctggtggtaaattctccaataaaaattatgaatttgcgggaggtttacacggtgtggggatttctgtagtgaatgcgctttctgaacgcgtggatattcaagttaaacgcaatggcgaaatctataaaattgcctttgaaaacggcagtaaagtagaagaattggaaattatcgggacttgtggcagacgcacaactggaacaactgttcacttcaaaccgaatccaaaatattttgacagcgcaaaattttccgttagccgcctacgccatttattaagagcgaaagcagtactctgctcagggcttgaaatcaaattcattgataaagtaaacaatactcaagatatttggttatatgaagatgggctttccgattaccttatcgaagcagtaaatggctttgaaacccttccggaaaaaccatttgttggcgaatttaaaggagcaaatgaagcggttagctgggcattactttggttgccagaaggtggcgaactgattggcgaaagctatgtaaacttaattccgactattcaaggcggaacacatgttaatggtctacgtcaaggtttattagatgccattcgagaattttgcgaatttagaaatctattgccacgcggggtaaaacttaccgctgatgatatttgggatcgctgttcttacattctttcccttaaaatgcaggatgcgcaattcgcagggcaaacaaaggaacgcttatcatcacgccaaagtgcggtgtttgtcagcggtgttttaaaagatgcgttcagcctatggctaaatcaaaatgtacaagatgctgaaaaattagcagaaattgccattagttctgcacaacgccgattacgtgcagcaaaaaaagttgtgcgaaaaaaactcgttagtggccctgcattaccaggaaaattagctgattgtggctcacaggatttagaaaaaacggaattatttttagtggagggcgactctgctggcggctcagcaaaacaagcacgtgatcgcgaatatcaagcgattttgccgttacgtgggaaaattttaaacacgtgggaagtttcccctgatcaagtattaggttcaaccgaaattcacgatatcgccgtggctctaggcatcgatcctgacagcaatgatttatcacaacttcgctatggtaaagtctgtattcttgcggatgctgactctgatggcctgcatattgccactctactctgcgccctgttcttacgtcattttccgaaattggtacaagacggtcacgtttacgtagcaatgccaccactttatcgcattgacttaaataaagaagtcttctacgcattagatgaaagtgaaaaagaagcgattttagatcgcttgaaaaataaaaaaggcaaaccgaatgttcaacgctttaaaggtttaggtgaaatgaacccatcgcaattgcgtgaaacaacaatggatccgaatactcgccgtctcgttcaattaacttatgatttaggggaagatcaaggctcagatacattagaactgatggatatgttattagcgaaaaaacgttccgaagaccgtaaaaattggttacaagcgaaaggcgatcaggttgatttatctgtttag

SEQ ID NO: 3174 - protein, 647 aa, Haemophilus influenzae
MIEFSQIKKLTNNLTMTTNYSAQEITVLKDLEPVQIRPGMYTDTTRPNHLAQEVIDNSVDEALAGFATKIEVILHTDQSIEVTDNGRGMPVDIHPTEGVSGVEVILTKLHAGGKFSNKNYEFAGGLHGVGISVVNALSERVDIQVKRNGEIYKIAFENGSKVEELEIIGTCGRRTTGTTVHFKPNPKYFDSAKFSVSRLRHLLRAKAVLCSGLEIKFIDKVNNTQDIWLYEDGLSDYLIEAVNGFETLPEKPFVGEFKGANEAVSWALLWLPEGGELIGESYVNLIPTIQGGTHVNGLRQGLLDAIREFCEFRNLLPRGVKLTADDIWDRCSYILSLKMQDAQFAGQTKERLSSRQSAVFVSGVLKDAFSLWLNQNVQDAEKLAEIAISSAQRRLRAAKKVVRKKLVSGPALPGKLADCGSQDLEKTELFLVEGDSAGGSAKQARDREYQAILPLRGKILNTWEVSPDQVLGSTEIHDIAVALGIDPDSNDLSQLRYGKVCILADADSDGLHIATLLCALFLRHFPKLVQDGHVYVAMPPLYRIDLNKEVFYALDESEKEAILDRLKNKKGKPNVQRFKGLGEMNPSQLRETTMDPNTRRLVQLTYDLGEDQGSDTLELMDMLLAKKRSEDRKNWLQAKGDQVDLSV

SEQ ID NO: 3175 - DNA, 2244 bp, Haemophilus influenzae
atgacaaatatcaactatgaaggcattgagcaaatgcctctacgcaccttcactgaaaaggcttatctcaactattctatgtatgtcatcatggatcgtgcgttgccttttatcggtgatggtttaaaacccgttcaacgccgtattgtatatgcgatgtctgaacttggcttaaatgctacggcaaaatacaaaaaatctgctcgtaccgtcggtgatgtacttggtaaattccatccacatggtgacagcgcttgttatgaagcgatggtgttaatggcacaacccttctcttatcgttatccgcttgtagatggtcaaggtaactggggggcgccagatgatccaaaatccttcgcagccatgcgttatacggaatctcgcctatctaaaatctctgaaatcttgttgaatgaactcggacaaggaacagtagattatcaaccaaactttgatggaaccttagctgaaccacaatatttacctgctcgtttaccgcatattttattgaacggcacaacaggtattgcagtggggatggcgacagatattccaccacacaatattaacgaaattgctgatgcggcagtaatgttgctagataatccaaaagcgagattagatgatgtacttgaaattgttcaaggcccagattttccaacagaagcggaaattatttcgccaaaatcagaaattcgtaaaatttatgagcaaggtcgtggctcaataaaaatgcgtgcaacttggaaaaaagaagacggcgagatcattatttctgcgcttccacatcaatcttctccctcaaaagttattgcacaaatagccgatcaaatgacggcaaaaaaactaccaatgctagaagatattcgagatgaagccgatcacgaaaacccaattagaattgtactagtccctcgctcaaatcgagtcgatactgatgccttaatggcacatttatttgctacaacagatcttgaaaaaagctaccgtgtaaatatgaatatgatcgggcttgatcataaacctgcggtaaaaggcttattagaaatcttaaatgaatggctcactttccgtcgcacaacggtcactcgtcgccttcaatatcgcttagataaagtactctctcgcttgcatattttagaaggcttgatgatagcctttttaaatattgatgaagttatcgaaattatacgccacgaagatgatccaaaagcagagcttatggcacgctttaatttaagcgatgaacaagccgatgccattttaaatttacgcttacgtcatttagcgaaattagaagaaaaccaactcaaagcagaacaagatgaacttgaaaaagagcggttaaatttagaagcaattttaggatcagaacgccgtttgaatacgcttatcaaaaaagaaattcaagaagatgcgaaaaaatatgccagtccacgtatgtctcaactggtcgaacgtgaagaagccaaaatgatctctgaaagtgatatgatgccagcagaaccagttactgtcatcttatcagaaatgggctgggtacgttgtgcaaaaggacacgatattgatcctaaatcattaagctacaaagctggcgatagctatctagctcacgcttgtggcaaaagtaatcaagccgttgtattcattgatagcacggggcggagttatgcactcgatccgctttcattgccttccgctcgctcccaaggcgaaccacttacaggtaaactcaatttacccactggtgcgaccattgaatatgttgtaatggccagcgaacagcaagaattattgatggcttctgatgcgggatatggttttatttgtaaatttgaagatttaattgcacgtaacaagactggaaaagccttgatttctttaccagaaaatgccaaagtgttgaagcctaaaacattgataaattctaccgcacttgttgtcgcaatcacatcagcaggcagaatgttgatttttccagcacaggatttaccggtattatcaaaaggtaaaggcaataaaatgatcactattcccgcagcgaatgcaaaagatcgtagcgaactattgacaaaattattgcttatttcagatcaagcaagtcttgaattttattctggaaaacgaaaaattgtattaaaaccagaagatctgcaaaagttccgcgcagaacgaggcagaaaaggttcgacattaccacgtggattacataccaatcttgaaattatggtaatcgagctgtaa

SEQ ID NO: 3176 - protein, 747 aa, Haemophilus influenzae
MTNINYEGIEQMPLRTFTEKAYLNYSMYVIMDRALPFIGDGLKPVQRRIVYAMSELGLNATAKYKKSARTVGDVLGKFHPHGDSACYEAMVLMAQPFSYRYPLVDGQGNWGAPDDPKSFAAMRYTESRLSKISEILLNELGQGTVDYQPNFDGTLAEPQYLPARLPHILLNGTTGIAVGMATDIPPHNINEIADAAVMLLDNPKARLDDVLEIVQGPDFPTEAEIISPKSEIRKIYEQGRGSIKMRATWKKEDGEIIISALPHQSSPSKVIAQIADQMTAKKLPMLEDIRDEADHENPIRIVLVPRSNRVDTDALMAHLFATTDLEKSYRVNMNMIGLDHKPAVKGLLEILNEWLTFRRTTVTRRLQYRLDKVLSRLHILEGLMIAFLNIDEVIEIIRHEDDPKAELMARFNLSDEQADAILNLRLRHLAKLEENQLKAEQDELEKERLNLEAILGSERRLNTLIKKEIQEDAKKYASPRMSQLVEREEAKMISESDMMPAEPVTVILSEMGWVRCAKGHDIDPKSLSYKAGDSYLAHACGKSNQAVVFIDSTGRSYALDPLSLPSARSQGEPLTGKLNLPTGATIEYVVMASEQQELLMASDAGYGFICKFEDLIARNKTGKALISLPENAKVLKPKTLINSTALVVAITSAGRMLIFPAQDLPVLSKGKGNKMITIPAANAKDRSELLTKLLLISDQASLEFYSGKRKIVLKPEDLQKFRAERGRKGSTLPRGLHTNLEIMVIEL

SEQ ID NO: 3177 - DNA, 1215 bp, Haemophilus influenzae
atgagctatacttttagcacgtatgaaacccttgcattagcaagcttagttttgctattgggctattttttggttaaacgcattaatgtattaaaaacatttaacattccagagccagttgttggtggctttattgttgccattggtcttttaatttggcacaaaattgatggaacatcctttaacttcgataaaaatctacaaaccacaatgatgttagtgttttttacttctatcggtttaagtgccaacttttcccgtctaattaaaggcggaaagccactcgttgtatttttattcattgctgcattattaatcttaggacaaaacgttattggcattgcaagctcaatggcattaggaatccatcccgcttatggcttacttgcaggttcagtaaccttaacaggtggtcacggcactggagctgcttgggcggatacatttgcacatcaatttaatctacaaggtgcaactgaaattgccattgcctgtgcaactttcggtttagtattcggtggtatcatcggtggtcctgtcgctcgtttcttattaaatcgccaaaaacaaggcgaaaatcctgaaaatgatgaagttgatgacattcaagaagcatttgaacacccaacttataaacgtaaaattactgcacgttcattaattgaaacaattgcaatgatttcagtatgtttattaattggtcaatatttagatgtacaaacaaaaggtactgcactccaattaccaactttcgtatggtgtttattcactggtgttattgtccgcaatattttaaccaacattttccgtttccaagtagcagaatccgctattgacgtattaggtagcgtaggcttatccatctttttagcaattgctttaatgtcattaagactttgggaacttgcaggtttagcaattgacgtattaattgttctggctattcaagtagcatttatggctgcctttgcaattttcattacttatcgagcaatgggtaaagattacgatgccgtcgtattaagtgctggacactgtggttttggtttaggcgcaaccccaacagcaatcgcaaatatgcaagctgtcaccagccgttttgggccatcgcacaaagcatttttaatcgttccaatggtcggagcattctttatcgacttaatcaacgctgcgctattaaaagtttcatttgcagttgtaaatatgctcgcgtaa

SEQ ID NO: 3178 - protein, 404 aa, Haemophilus influenzae
MSYTFSTYETLALASLVLLLGYFLVKRINVLKTFNIPEPVVGGFIVAIGLLIWHKIDGTSFNFDKNLQTTMMLVFFTSIGLSANFSRLIKGGKPLVVFLFIAALLILGQNVIGIASSMALGIHPAYGLLAGSVTLTGGHGTGAAWADTFAHQFNLQGATEIAIACATFGLVFGGIIGGPVARFLLNRQKQGENPENDEVDDIQEAFEHPTYKRKITARSLIETIAMISVCLLIGQYLDVQTKGTALQLPTFVWCLFTGVIVRNILTNIFRFQVAESAIDVLGSVGLSIFLAIALMSLRLWELAGLAIDVLIVLAIQVAFMAAFAIFITYRAMGKDYDAVVLSAGHCGFGLGATPTAIANMQAVTSRFGPSHKAFLIVPMVGAFFIDLINAALLKVSFAVVNMLA

SEQ ID NO: 3179 - DNA, 825 bp, Haemophilus influenzae
atggatattttagatccgaatcactgtttcttaaaactctcgcaaaatccaccgcactttcagattttttatcaagaaaattctgagtcgaaaccttatttattgtctgattatgatgcagttttgcctcgatttggcacaacgagtacgcaaatgggatgttcagtcttacaacattttgaaggcaaagggactttttgtttaaattcatctcaggcatttttaaatgcacgtgataagtggaaaagtttgcaacttttgctgaaggctggtgttcctgttcccaattcacttttaggtggcagtgaagtgcaagctcaggcgacgatagctcatatcagttctccgacaattttaaaaacgctaaatggttcacaaggaattggggtaattttagctgaaaaaccacaaagtgcggtgagcattatggaagcttttaagcaaaccaatatatctatgctacagcaagattttattgaagaagcgggcaatgcggatattcgttgttttgtgatgggtgatcaagtggtagcaacgatgcagagaattgggcaaaatggtgagtttcgggcgaattgccatcgtggcggaaaaaccgaaaaaattaccctaagcgatgaagaaaagcagatagccattcaagcaacaaaagctatcggtttagatgtggctggcgtggatttaattcgttcgaaaaatggattattggttttagaagtgaatgcaagcccaggcttagaaatgattgaaaaaacaagtgggattgatattgcagctgaaataattgattatattgaaataaatgcctttatcaattcaagataa

SEQ ID NO: 3180 - protein, 274 aa, Haemophilus influenzae
MDILDPNHCFLKLSQNPPHFQIFYQENSESKPYLLSDYDAVLPRFGTTSTQMGCSVLQHFEGKGTFCLNSSQAFLNARDKWKSLQLLLKAGVPVPNSLLGGSEVQAQATIAHISSPTILKTLNGSQGIGVILAEKPQSAVSIMEAFKQTNISMLQQDFIEEAGNADIRCFVMGDQVVATMQRIGQNGEFRANCHRGGKTEKITLSDEEKQIAIQATKAIGLDVAGVDLIRSKNGLLVLEVNASPGLEMIEKTSGIDIAAEIIDYIEINAFINSR

SEQ ID NO: 3181 - DNA, 264 bp, Haemophilus influenzae
atgttcgttgttatttttggtcgtcctggctgcccttactgtgtgcgtgcaaaaaaccttgctgaaaaattaaaaggcgaagttgctgattttgactatcgttatgtggatattcacgcagaaggcattactaaagaagatttatcaaaatctgttggtaaaccagtagaaaccgtaccacaaatctttattgatgaaaaaccaattggtggttgcactgattttgaagcattaatgaaagaacaatttggtatcgttgcttaa

SEQ ID NO: 3182 - protein, 87 aa, Haemophilus influenzae
MFVVIFGRPGCPYCVRAKNLAEKLKGEVADFDYRYVDIHAEGITKEDLSKSVGKPVETVPQIFIDEKPIGGCTDFEALMKEQFGIVA

SEQ ID NO: 3183 - DNA, 1221 bp, Haemophilus influenzae
atgagaagaactgtaattacaggctttgggattatttcaagtatcggtaacaacaaagaagaagtattggcttcattaaaagcagggaaatcaggtattgaagttgtgcctgagtttgtagaaatgaatatgcgtagccatgttgccggaacaatcaaattaaacccaagcgagcacattgatcgtaaagtgttccgttttatgggtgatgcagcggcttatgcttatctttctatgcgtgaagcgattgaagatgcaggcttaacagaagatcaagtttctaatgatcgtactggcttagtgattggcgcaggtacggggtctgcacataatcaattagtggcttgtgatgcggttcgtggccctcgcggtgtaaaagcgattggtccttacgctgtaacgaaaaccatggcatcaagtgtttcagcttgtttagcaacaccttataaaattcgtggtgtgaattattctatgagttctgcttgtgcaacctctgcacattgtattggtcatgcggttgaattaattcaattaggcaaacaagatatcgtttttgctggtggtgcagaagagttatcttgggaatgtgctactgagtttgatgcaatgggtgcagtttcaactaaatacaatgaaacgccagaaaaagcatctcgtgcttatgacgcaaatcgtgacggtttcgttattgcaggcggtggtgctgttgtggttgtggaagaattagaacatgcacttgctcgtggtgcaaaaatttacgctgaaattgtaggttatggcgcaacttctgatggttacgatatggttgcaccaagtggtgagggtgcagagcgttgtatgaaacaagcaatggcaactgtcgataccccaattgattacatcaatgtacatggcacatctacaccagtaggtgacgtgaaagaattaggtgcaatcaaaaatgtatttggtgataaaatcccagcgatttcttcaactaaatcaatgactgggcactctttaggggctgcaggtgcacacgaagcaatttatactttattaatgcttgataatgactttattgcaccaagtattaatatcgaaaccttagatgaagccgctgaaggttgtaatatcgttactgagacgaaagaaaatgctggtttacaaactgtcatgtcaaatagctttggttttggtggtacaaatgcgacattaatttttaaacgttataacggttaa

SEQ ID NO: 3184 - protein, 406 aa, Haemophilus influenzae
MRRTVITGFGIISSIGNNKEEVLASLKAGKSGIEVVPEFVEMNMRSHVAGTIKLNPSEHIDRKVFRFMGDAAAYAYLSMREAIEDAGLTEDQVSNDRTGLVIGAGTGSAHNQLVACDAVRGPRGVKAIGPYAVTKTMASSVSACLATPYKIRGVNYSMSSACATSAHCIGHAVELIQLGKQDIVFAGGAEELSWECATEFDAMGAVSTKYNETPEKASRAYDANRDGFVIAGGGAVVVVEELEHALARGAKIYAEIVGYGATSDGYDMVAPSGEGAERCMKQAMATVDTPIDYINVHGTSTPVGDVKELGAIKNVFGDKIPAISSTKSMTGHSLGAAGAHEAIYTLLMLDNDFIAPSINIETLDEAAEGCNIVTETKENAGLQTVMSNSFGFGGTNATLIFKRYNG

SEQ ID NO: 3185 - DNA, 2013 bp, Haemophilus influenzae
atgacctttagcgtccaacatgctgagattcacttcaatcaaaaccatattcccgtctcagatcaattcgatgatgtctatttttctaacgaaaatggattggcagaaaccgattatgtttttctacaaggtaatcaactttgggaacgttggataacacacaaagacgctaattttgtcatcgctgaaacaggatttggtacaggattaaatttctttgcggtaaccaaattgttccgtgaatttcgccagcaacacgagaatcatcctttaaaacgcctaaattttatttcctttgaaaaatatccgctaaaaatcaccgcacttttgcaagcgcatcttgcctatccgcagtttgaagatttaagcgctcatttgcaacgttattggccttcattgattctaggttgtcatcgtattcattttgaagagaccaccttagatttatggttcggtgatgtatcagaaaacttgccacaacttggcgattatatgaatgaacgtattgatgcttggtttttagatggctttgcgccgagtaaaaatcctgaaatgtggaatgatgatctctataacttgatatttcgtttcacgaaacccaatggaacttttgccactttcaccgcagcaagtgcagtcagaaaaggacttgaatccgcaggctttaatgtgacaaaacgtaaaggcttcggcaaaaaacgagaatgtttaagtgggttaaaaatacaatcaaaatctaccgcactttcaacaccttggtatcttgctcagcctgcgaaaatggaaaaacaagatttcgctattatcggtggtggtattgcttctctttgtgcggccatttccttagtaaaacgtggggcaaaagttaccatttattgtgaagatgccgcgctcgcactcaatgcctcaggcaataaacaaggtgcattttatccgcaacttagcgatgataatgtgctcaccgttgatttctacctgcacgctttcagttacggtcgccaattacttgattgggcaatcgaacaaaacatagcgtttgaacacgaattttgtggcgtggcactatgtgcttacaacgaaaaaagtgcggttaaattaacaaagatttctcagcttggtttaccgaacgaaatcttccaaatgctgagtgctgaacaactcagtgaaaaagtgggattaccgcttaattgcgaaggcggttggattgagcaaggggcttggcttgcaccaagacaatttgttcaaaattccttttcatttcttgaaaagcagggtgtcatcattaaaaccgcacaaaaaattaccgcactttctcaagaagaaaaaggttgggaactaaaaaatatgcaaggtcaaaaatactgccatgaagtcgtcattcttgcgaacggacataaaattactgattttgttcaaacagaaaagctaccgctctaccctatccgcgggcaagtcagccaaattccaacatcagaaaacttactcaaactgaaatctgtgctttgttatgatggctatcttactccagccaatcaattaaaaacctcacattgcatcggtgcaagccatgttcgtgataatgttgatcgccattttagcgaacaagaacaacaagaaaaccaacaaaaactccaacaaaatatcgcccaaccttggacgcaagatgtgaatacatcagataatctcgctcgtgtaggcattcgttgctctgtaagagatcttgccccaatggtgggaaacgtgcctcattttgaacagcaacaagcgggttattacaatctatttaacctccgccgccgtaaacaacctattcaaagtgcggtcaattttcagaatattttcttaatcgcagccttaggttctcgcgggcttacctctgctccactcttaggcgaaaccttagcttcaatcatttatggcgagccattaccaataagcgaaggcatattacataatctttcagctaaccgagcttgggtaaaaaagtggttgaaaggttcaaaagttgaataa

SEQ ID NO: 3186 - protein, 670 aa, Haemophilus influenzae
MTFSVQHAEIHFNQNHIPVSDQFDDVYFSNENGLAETDYVFLQGNQLWERWITHKDANFVIAETGFGTGLNFFAVTKLFREFRQQHENHPLKRLNFISFEKYPLKITALLQAHLAYPQFEDLSAHLQRYWPSLILGCHRIHFEETTLDLWFGDVSENLPQLGDYMNERIDAWFLDGFAPSKNPEMWNDDLYNLIFRFTKPNGTFATFTAASAVRKGLESAGFNVTKRKGFGKKRECLSGLKIQSKSTALSTPWYLAQPAKMEKQDFAIIGGGIASLCAAISLVKRGAKVTIYCEDAALALNASGNKQGAFYPQLSDDNVLTVDFYLHAFSYGRQLLDWAIEQNIAFEHEFCGVALCAYNEKSAVKLTKISQLGLPNEIFQMLSAEQLSEKVGLPLNCEGGWIEQGAWLAPRQFVQNSFSFLEKQGVIIKTAQKITALSQEEKGWELKNMQGQKYCHEVVILANGHKITDFVQTEKLPLYPIRGQVSQIPTSENLLKLKSVLCYDGYLTPANQLKTSHCIGASHVRDNVDRHFSEQEQQENQQKLQQNIAQPWTQDVNTSDNLARVGIRCSVRDLAPMVGNVPHFEQQQAGYYNLFNLRRRKQPIQSAVNFQNIFLIAALGSRGLTSAPLLGETLASIIYGEPLPISEGILHNLSANRAWVKKWLKGSKVE

SEQ ID NO: 3187 - DNA, 1032 bp, Haemophilus influenzae
atgcaatcaatcaatcaatcaatcaatcaatcaatcaatcaatcaatcaatcaatcaatcaatcaatcaatcaatcaatcaatcaatcaatcaatcaatcaatcaatcaatcaatcaatcaatcaatcaatcaatcaaattgtaggatttgttaaaacttgctacaagcctgaggaagtatttcattttcttcatcagcattccattcctttttcctccattggaggaatgaccaatcaaaatgttctacttaatatttctggagttaagtttgtattacggatccctaatgccgtaaatttatcacttataaatcgagaatatgaggcattcaataatgctcaggcatatcgtgctggcttgaatgtagaaactcccgtattagatgccaaaagtggcgtaaaactgactcgttatttagaaaatagtaatactttaagtcagatacaattaaacgaacaaagttgtttgtctcaagttgtgaataatttatatcgtttacacaatagtgaatttgtttttcgtaatgtatttagcgtattcgatgagtttcgccaatatttttcattgctagaaaacaaatccgctttttatcaagctgattcgagaatggataaactttcagctgtattttggcaatttgaagaaatcaataaagacataattttacgtccgtgccacaatgatttagtccctgaaaatatgttattacaagatgatcggctattttttatcgattgggaatattcgggcttaaatgatccgctatttgatatagctactatcattgaggaagctcatttatcaaaagaagctgctgattttctattagaaacctattgcaatcagacaaataaatatcacaagacagaatttcaaatcgctcacaaacggttaaaaatccatcgcttttgccaaaatgtattgtggtttttatggacaaaagtaaaagaagaacacggcgagaattttggcgattatgcgttaaaacgcttagacgcagcatttaaactgttagaggaattgccataa

SEQ ID NO: 3188 - protein, 343 aa, Haemophilus influenzae
MQSINQSINQSINQSINQSINQSINQSINQSINQSINQSINQSINQIVGFVKTCYKPEEVFHFLHQHSIPFSSIGGMTNQNVLLNISGVKFVLRIPNAVNLSLINREYEAFNNAQAYRAGLNVETPVLDAKSGVKLTRYLENSNTLSQIQLNEQSCLSQVVNNLYRLHNSEFVFRNVFSVFDEFRQYFSLLENKSAFYQADSRMDKLSAVFWQFEEINKDIILRPCHNDLVPENMLLQDDRLFFIDWEYSGLNDPLFDIATIIEEAHLSKEAADFLLETYCNQTNKYHKTEFQIAHKRLKIHRFCQNVLWFLWTKVKEEHGENFGDYALKRLDAAFKLLEELP

SEQ ID NO: 3189 - DNA, 879 bp, Haemophilus influenzae
atgcgtggctatctctttggcatactgtccgctgtattttgggcattatctggactgttgtataatgaattgccattaagtgaatataccgcgttagggaaagtaatttcattactttttttaattgatttttgctcgttattagttatcggcatcacattatggcgaaaaagtgcggtagattttcaaggtgttttttggcaacctgcgttatctggcatattaggcggaccaataggaatgtctgcctatttattaagcattcattatttaacaatctattatgctgcaccgctttcatctctctttcctgttttcgctgcgttaatgtcttattggattctaaaagaaaaaattaccaaaacagcccaattcggattcgccttggctattatttcttcttcgttgcttgctattgaagtaggacaagaaataacctttaatactatcggttttatttttttaataatttgtatattagggtggtcatctgaaatagtgatatcctcctatacaatgcgttctctctctggacttcaggtgtattttttaagactatgtggttcaactattggttatttattgattctatttattctttccttgaaaaatttctcactagatatacttagttttaattatgtacaaattgctggtgtaataatctttggggcattatcttactgctgctattaccaagcgatttatctgttaaaaccaatcaaagcaatggcattaaatatcacatattctgtatgggcaattggacttggttatctgctctataaacagccaattaagcccattaccttactacttaccttattattaagtgcaggagtgatcgttacactttattacaaaggggaacaaaaatga

SEQ ID NO: 3190 - protein, 292 aa, Haemophilus influenzae
MRGYLFGILSAVFWALSGLLYNELPLSEYTALGKVISLLFLIDFCSLLVIGITLWRKSAVDFQGVFWQPALSGILGGPIGMSAYLLSIHYLTIYYAAPLSSLFPVFAALMSYWILKEKITKTAQFGFALAIISSSLLAIEVGQEITFNTIGFIFLIICILGWSSEIVISSYTMRSLSGLQVYFLRLCGSTIGYLLILFILSLKNFSLDILSFNYVQIAGVIIFGALSYCCYYQAIYLLKPIKAMALNITYSVWAIGLGYLLYKQPIKPITLLLTLLLSAGVIVTLYYKGEQK

SEQ ID NO: 3191 - DNA, 702 bp, Haemophilus influenzae
atgaatgcaatcattttagcagcaggattaggcagtcgttttaaagacatcacacaaagcacacataaatcattgttagatattcacggcacacctaacttagaacggacactcacttttctacgtcaagcaaatatcgacaatattgtcattgttacagggtatttacacgaacaattcgagtatctaaagaaaaaatatgactgcaccttgatttacaacgaaaaatatcgcgaatataacagcatttattccttttctctggcgcaagacttctttaatgattgttatgtgattgatgcggatgtagtgcttaatcgaaatatttttctaacgaaaccatcacacagcagatatttcacagtcatccgttctaaaacgcacaatgaatggctaccgattttaaatagtaatgggcaagtaatgcgtattgagattggatcattaaaccagcctagcttgtcaggggtatcttattggacaactcgggattgcaatatcattctaactttgctcaaagaatacacaagtgaagtgcggttaaaaaatccaaaactttattgggataccattccgatggaatatatagagaaattgaatatctatacggaacaacttaacagtgatgatatatttgaaatggataaccctgatgactatcaccacattttacaaaaattgacaccaaacaaggaaaaataa

SEQ ID NO: 3192 - protein, 233 aa, Haemophilus influenzae
MNAIILAAGLGSRFKDITQSTHKSLLDIHGTPNLERTLTFLRQANIDNIVIVTGYLHEQFEYLKKKYDCTLIYNEKYREYNSIYSFSLAQDFFNDCYVIDADVVLNRNIFLTKPSHSRYFTVIRSKTHNEWLPILNSNGQVMRIEIGSLNQPSLSGVSYWTTRDCNIILTLLKEYTSEVRLKNPKLYWDTIPMEYIEKLNIYTEQLNSDDIFEMDNPDDYHHILQKLTPNKEK

SEQ ID NO: 3193 - DNA, 456 bp, Haemophilus influenzae
atgaaaaaattgactctcagagaacaacaactcgtttgtctcaatatattagattatttccacgcattatgtgagcgacaccaaattcactattctcttggtggtggaacattaatcggtgctatacgccacaaaggctttatcccttgggatgatgatattgatgtttatatgcaccgtgatgaatatcaaaggttcgttgatgtttggtttcaagaaactcacgaatactacaatatagaaacagtggaagatatccttgctcaaaagactggagaaatggcaaaaatctttgattgtcgtactcaaataaccgaaattgctggaaaaaaaagtgcaatgtttatagatatattcatctatgatggggtgccaaatgatccaaagatcatctgctcttttatgaaaaaatatagaagaactcatcgtcgtttctattcttgcaagaaaagatag

SEQ ID NO: 3194 - protein, 151 aa, Haemophilus influenzae
MKKLTLREQQLVCLNILDYFHALCERHQIHYSLGGGTLIGAIRHKGFIPWDDDIDVYMHRDEYQRFVDVWFQETHEYYNIETVEDILAQKTGEMAKIFDCRTQITEIAGKKSAMFIDIFIYDGVPNDPKIICSFMKKYRRTHRRFYSCKKR

SEQ ID NO: 3195 - DNA, 306 bp, Haemophilus influenzae
ttgagccatttaatattttccaaaatgcaaaaaaatctagagcaatttcaaataacatatccgataaaacaatgcgattatattggtcttgtattatctgattatgacgattacggaggatggcaaaaatcttatatgccgaaggaatattttaaccatgttatttataaagaatttgaaggacgacaatttcaagtaatgaatggatatcacgaacacttaacacaatattatggagattatatgaagcttccaccagaagaagaccaaaagccacatcatattcaagaagcgtatattttgtaa

SEQ ID NO: 3196 - protein, 101 aa, Haemophilus influenzae
MSHLIFSKMQKNLEQFQITYPIKQCDYIGLVLSDYDDYGGWQKSYMPKEYFNHVIYKEFEGRQFQVMNGYHEHLTQYYGDYMKLPPEEDQKPHHIQEAYIL

SEQ ID NO: 3197 - DNA, 1848 bp, Haemophilus influenzae
atgtttcgagtattaaaattttgttggaaagtgctgtgtttcattcgtgatcttgtgatgaatgttgtgtttttaggctttgtactattgctagtggcgattattagcttttcaagcggtggaaaaaaatctacaacattaacaggggatggcgcattattgctcaatttagatggttatttagcggacaaccgagatgaaacacttcgttggcaagatgcgttaagcgaattgaatggcgagcacgtccctagaaaaatttcgacttttgatgtggtatttgccattcaacaagcggaagatgatcctaaaattaaaggattagtgctagatcttaattattttcaaggggcagatttgcccgcattagattttattggtggtgctatcagtcactttaaagatgcagggaaaccagtgatcgcctatgcagataattattcacaaggacaatattatttagcgagctttgctgatgaaatttatttaaattcaattggaagcgtggatattcacggtttatcgcaagagaatttgtattttaaagagatgctcgacaaattagccgttacaccacatattttccacgtggggacttataaatcagcagttgaaccatttttacgcaacgatatgtcggctgaggcaaaagcaaatatgcaacgttggttaggcgaaatgtggaataattatgttttatccgtcagtgaaaatcgtaatattaagaaagataacattttgccgaatgcgaaacagtatcttgcagaacttaaagcgttaaaaggcaatagtacggcatacgcacaacaacgtggattagtaactgatgttgtaactcgtttggatttagataaaaaactagccgcactttttggcaaaggaagtgatggaaaagcgaaccttatcgaatttgatgattatttgactcaactgcctgatcgtttagaacattacaatgtaccgaataaaattgcggttgtgaatgtcgagggaacgattattgatggagaaagtgatgatgaaaattcaggtggcgacaccattgcgcgaattcttcgtaaagcccacgatgacaattctgtgaaagccgtgattctacgcgttaattcacctggcggaagtgcttttgcttctgaaattatccgtcaagaaacagaaaatttacagaaaatcggtaagcctgtcatcgtatctatgggcgcaatggctgcatctggtggttattggatttcatccactgcagattatattattgccgatgcaaacactattacgggctctatcggtattttcacgatgttcccgactttcgaaaatagtattaagaaaataggcgtgcatgcagatggtgtttcaaccactgaattagctaatacatctgcgttttctccattagcaaaacccgtgcaagatatttatcaaacagaaattgagcatggttatgacagatttttagaaattgtcagcaaaggtcgccagctttctaaaacacaagtagataaacttgctcaaggtcaggtttggttgggcagtgatgcattccaaaatggtttagtggatgagataggttcttttaatgaagcggtcaataaagcagagcaattagtgaatcaacgccaagatactgccgtgcaagattttagcgtggaatggtttacagatgataacgttagtttaattagcaccttattgcgcgatactaaaaaaggggcgcaagagcagttagttaaatggcttggtttgcctgctccaattcaaaaattacaaaaagaattgaatgtattaactaaatttaatgatcctaaaggtcagtatttgtattgtttgaattgtggaaaagtgaagtaa

SEQ ID NO: 3198 - protein, 615 aa, Haemophilus influenzae
MFRVLKFCWKVLCFIRDLVMNVVFLGFVLLLVAIISFSSGGKKSTTLTGDGALLLNLDGYLADNRDETLRWQDALSELNGEHVPRKISTFDVVFAIQQAEDDPKIKGLVLDLNYFQGADLPALDFIGGAISHFKDAGKPVIAYADNYSQGQYYLASFADEIYLNSIGSVDIHGLSQENLYFKEMLDKLAVTPHIFHVGTYKSAVEPFLRNDMSAEAKANMQRWLGEMWNNYVLSVSENRNIKKDNILPNAKQYLAELKALKGNSTAYAQQRGLVTDVVTRLDLDKKLAALFGKGSDGKANLIEFDDYLTQLPDRLEHYNVPNKIAVVNVEGTIIDGESDDENSGGDTIARILRKAHDDNSVKAVILRVNSPGGSAFASEIIRQETENLQKIGKPVIVSMGAMAASGGYWISSTADYIIADANTITGSIGIFTMFPTFENSIKKIGVHADGVSTTELANTSAFSPLAKPVQDIYQTEIEHGYDRFLEIVSKGRQLSKTQVDKLAQGQVWLGSDAFQNGLVDEIGSFNEAVNKAEQLVNQRQDTAVQDFSVEWFTDDNVSLISTLLRDTKKGAQEQLVKWLGLPAPIQKLQKELNVLTKFNDPKGQYLYCLNCGKVK

SEQ ID NO: 3199 - DNA, 555 bp, Haemophilus influenzae
atggatgcacttacacttttaaccacaagaaaatcaaacaaaaaattgaccgcacctgcacctaatgcagaacagcttgaacttattctccaagcagcaatgcatgtaccagatcacgggaaattacatccttatcattttattgtaatggaaaatgatggattaaataaattggaaacactactcaaagcagccgttgtggaatttgatttgggggaagaaaaattgatgaaagccgaaaacctagcacatcgtgcacctatggttattggcgtggtagcaaaaatcgatccaactatcgctaaagtgccagattgggaacaaatgttgagtgcaggttgtgcaacttatggattacaactggctgcacaagcacaaggatttgataatgtgtggatttcagggaaatgggttaatggcactgcattacgagaagctttcggatgtcgtgaacaagatcgtgtgattgcgttagtcatgattggcacaagtatggagaaagccgaacgtgaatgccgtattattgatacaaaagattttgtaacctatctataa

SEQ ID NO: 3200 - protein, 184 aa, Haemophilus influenzae
MDALTLLTTRKSNKKLTAPAPNAEQLELILQAAMHVPDHGKLHPYHFIVMENDGLNKLETLLKAAVVEFDLGEEKLMKAENLAHRAPMVIGVVAKIDPTIAKVPDWEQMLSAGCATYGLQLAAQAQGFDNVWISGKWVNGTALREAFGCREQDRVIALVMIGTSMEKAERECRIIDTKDFVTYL

SEQ ID NO: 3201 - DNA, 555 bp, Haemophilus influenzae
atgtctgaaaaacaaattaataatttttcattaattagtcgattattcggtaatcttttttatcgttctccaacagataaagttcttgcaggcgcatttgattggttacaacaaaaaggtttgagtcaagtttgggcgttagatactgataaagaaagtgaattagcgttgaatagcttgcaagttaaaatcgatctcaatttgttgaacgaagagtatcaaaaattatttggtgcgaatgggaaagtgatgacggctatttcagcttatggcattgatgttgaagaatttgtgaattttcgtcttgtacgcaatatgccagaggtggaaagtgcggatcattttgctttattattgctcacagcctcttggcttgaagataattcggattctttagtggctcaacaagaattctttgaaacttttttactgccttgtgcagcgaagtttttaactcaagttgaaacgcaagcaactttgcctttttatcgtgcattggcccttcttacacgagaaatattggcggcaatggcggatgaattggaagaagagtag

SEQ ID NO: 3202 - protein, 184 aa, Haemophilus influenzae
MSEKQINNFSLISRLFGNLFYRSPTDKVLAGAFDWLQQKGLSQVWALDTDKESELALNSLQVKIDLNLLNEEYQKLFGANGKVMTAISAYGIDVEEFVNFRLVRNMPEVESADHFALLLLTASWLEDNSDSLVAQQEFFETFLLPCAAKFLTQVETQATLPFYRALALLTREILAAMADELEEE

SEQ ID NO: 3203 - DNA, 609 bp, Haemophilus influenzae
atgaatcacttaattatttttgctcatcctaattcagtgcgtagttttgggcgagcgattgccaatcgtattgagcaaattagtcaagaaaatggtgtaaatgtattttttcgtgatctttatgaaatgaatttcaatccaattttatctcatgaagaattgcagaatgctaacaaaggtattattccagaagatattcagcaagagcatgattttattcttcaagcagatttaattacgttggtttatcccctttggtggatggggttcccatcaattttgaaaggctatttagatcgcgtattaagtcacggttttgcctataaaacagaaaacggcgaatcagtggggttgctaaaaaataagcaaatgcagcaatttattacgattggcagtaatgttgatcaatataaagaatttggtgtggataaatcgcttaatcattgtttgattaatggattattcaattattgtggaattgaaaatgtcgagtttgaattattcggtgatattcatttaattgatgataaggcgcgtaaagcgatgattgaacttgctgctcaaaaaactcaagcaaaattgaccgcacttttaaaggaaaaagagtaa

SEQ ID NO: 3204 - protein, 202 aa, Haemophilus influenzae
MNHLIIFAHPNSVRSFGRAIANRIEQISQENGVNVFFRDLYEMNFNPILSHEELQNANKGIIPEDIQQEHDFILQADLITLVYPLWWMGFPSILKGYLDRVLSHGFAYKTENGESVGLLKNKQMQQFITIGSNVDQYKEFGVDKSLNHCLINGLFNYCGIENVEFELFGDIHLIDDKARKAMIELAAQKTQAKLTALLKEKE

SEQ ID NO: 3205 - DNA, 1245 bp, Haemophilus influenzae
atgaacacatcacgtctatttagtctgttatttcagggtagtttggtaaaacgaattgccgctggcttggttcttggtattgttgttgcattgatttcagcaccattacaagaaaccattggttttaatcttgctgaaaaagttggcgtattaggtacgatttttgtaaaagctctgcgtgccgttgcaccaattttaattttctttcttgttatggctgcccttgcaaaccgtaaaattggtacgaaaagcaatatgaaagaaataattgtgctttaccttttaggaacattcttagctgcatttgttgctgttattgctggtttcgcattcccaacggaagtggtattggctgcgaaagaagattcaagttcagcaccacaagccgttggtcaagtgttgctaacattaattttaaatgtggtagataatccattaaatgcaattttcaaagcaaactttattggtgtattagcatggtctatcggtttaggtttggctttacgtcatgcatctgatgcaactaagaacgtattatctgattttgcagaaggtgtatcaaaaattgttcacgtgattatttcttttgcgccatttggtgtattcggtttagtggctgaaaccttatctgataaaggtttagtcgcattaggcggttatgtgcaattacttgctgtattaattggtacgatgttatttactgcttttgttgtaaatcctattttagtttactggaaaatccgtcgtaatccttacccattagtgtggacttgtgtacgcgaaagtggggtaactgcattcttcacacgtagttctgcagcaaatattccagtgaacattgaattagcaaaacgattaaatcttgatgaagaaacttattctgtttctattccattgggtgcgaatattaatatggcgggtgcggcgattactattactatcttaactttagccgcagttcatacactaggcttagaagtttctttcgttagtgcacttttattaagtattgttgcagcactttgtgcttgtggtgcatctggcgtagcgggcggttcattattattaatcccattagcatgtagcttatttggtatttctgatgatgtagcagcgcaaatgatcggtgttggtttcattatcggtatcttacaagactcaaccgaaacagcattaaactcatcaactgacgtattatttactgcggcagtatgtatggaagaagaacgtaaaaatgcagcataa

SEQ ID NO: 3206 - protein, 414 aa, Haemophilus influenzae
MNTSRLFSLLFQGSLVKRIAAGLVLGIVVALISAPLQETIGFNLAEKVGVLGTIFVKALRAVAPILIFFLVMAALANRKIGTKSNMKEIIVLYLLGTFLAAFVAVIAGFAFPTEVVLAAKEDSSSAPQAVGQVLLTLILNVVDNPLNAIFKANFIGVLAWSIGLGLALRHASDATKNVLSDFAEGVSKIVHVIISFAPFGVFGLVAETLSDKGLVALGGYVQLLAVLIGTMLFTAFVVNPILVYWKIRRNPYPLVWTCVRESGVTAFFTRSSAANIPVNIELAKRLNLDEETYSVSIPLGANINMAGAAITITILTLAAVHTLGLEVSFVSALLLSIVAALCACGASGVAGGSLLLIPLACSLFGISDDVAAQMIGVGFIIGILQDSTETALNSSTDVLFTAAVCMEEERKNAA

SEQ ID NO: 3207 - DNA, 441 bp, Haemophilus influenzae
atgaacaaccaaactttggctacacaatatgaaatggatttttcttataatccactgccttttttcagtgatatagaagataaccttaaattcaacaaaaaattagatttaaatctttactgtatcaaacgtccaaaacaaacttgttttattcatataactaacccaaatatgttggcctggggaattgaaagcggcgatatgttagtcgtcgaaaaaaatgacgatctttattctggtgatcttgttgtgctagaagaaaataatgaatttcatgtctatgaatttatggcgcatagcggcaattatctttttatggcattggattccacaacacaaaatataaatacaaaagattggtcaaatttacctattatcggcaccgtaaccaatacgattcatcaaatgaaacgtcgcaataaaatgaaatgggcagcgtag

SEQ ID NO: 3208 - protein, 146 aa, Haemophilus influenzae
MNNQTLATQYEMDFSYNPLPFFSDIEDNLKFNKKLDLNLYCIKRPKQTCFIHITNPNMLAWGIESGDMLVVEKNDDLYSGDLVVLEENNEFHVYEFMAHSGNYLFMALDSTTQNINTKDWSNLPIIGTVTNTIHQMKRRNKMKWAA

SEQ ID NO: 3209 - DNA, 1089 bp, Haemophilus influenzae
atggctaaagagaaaattgaaattgtcgtggcaaacgacgatacgcgaattgaaaaagtcgatcaggtgttaccacccattgcattattagaaaaatacccagcaagtgaacatgctgcggcgttagtgaagcaaactcgtcatgaggcacataatattattcatggtaaagatgatcgtttattagtcgtgattgggccttgctctattcatgatccgaaagttgccattgaatatgcgactcgtttaaaaccattacgtgaaaaatacaaagatagccttgaaattattatgcgtgtgtattttgagaaaccgcgtacaacggtgggttggaaaggtttaattaatgatccatatttgaatgatacttatcgtttaaatgatgggttgcgtattgcacggaaattactttcagatattaatgatcttggtgtgcctgcagcgggcgagtttttagatatgattacacctcagtatttggcagattttatgagctggggggcgattggggctagaacaacagaatcacaagttcatcgtgagttggcttcaggtttatcttgtgctgttgggtttaaaaatgccactaatggtggtgtgaaagtcgctttagatgcaattggtgcggcggaagctccccacaatttcttatctgtcactaaatttggtcattctgcaattgtttctacaaaagggaatgaagattgccatattattttacgaggtggagataaaggccctaactatagtgctgaagatgtagaaaaagtttgtgctgatattgaaaaaacagggcgtattccacacgttatggttgattttagccatgcaaacagcagtaaacaatataaaaagcaaatggatgtttgccaagacgtatgtaatcagattgcatttggttctaaacaaatctttggcgtaatggtggaaagccatttagtggaaggtcgtcaagatttagttgatggcaaagcacagacttatggacaaagtattacggatgcgtgcattggatgggaagattctgaaagattattgcaacaactttctgatgcagttattgctagacgtaaagtaatgagtaattaa

SEQ ID NO: 3210 - protein, 362 aa, Haemophilus influenzae
MAKEKIEIVVANDDTRIEKVDQVLPPIALLEKYPASEHAAALVKQTRHEAHNIIHGKDDRLLVVIGPCSIHDPKVAIEYATRLKPLREKYKDSLEIIMRVYFEKPRTTVGWKGLINDPYLNDTYRLNDGLRIARKLLSDINDLGVPAAGEFLDMITPQYLADFMSWGAIGARTTESQVHRELASGLSCAVGFKNATNGGVKVALDAIGAAEAPHNFLSVTKFGHSAIVSTKGNEDCHIILRGGDKGPNYSAEDVEKVCADIEKTGRIPHVMVDFSHANSSKQYKKQMDVCQDVCNQIAFGSKQIFGVMVESHLVEGRQDLVDGKAQTYGQSITDACIGWEDSERLLQQLSDAVIARRKVMSN

SEQ ID NO: 3211 - DNA, 1251 bp, Haemophilus influenzae
atgaatacgccgttttttattagctggcgttatcaacgtggcaagcaaaaaaatcctttagttgcgttaattgcaaaattttctgcaattggtattgcattgggtgttgcagttttaattgttggtttaagtgcgatgaatggttttgagcgtgagcttaatcaacggattttggcagtcgtgccgcatattgagattttttctgtgcatcaagcgaaagatcccacaattcatcattggcaaaatttagaaaaacgcctacaacaaaatccacaaattaaaggaatctctccttttgttagctttacggcattggtagaaaatggctcaaaattgaaagttgttcaggtcaaaggtgttgaaaaacaagcagaagataaggtaagttcaattggcaattttgtacaagagcaaggttggaacaaatttgagaaagaaggcggattggtcttgggagcgggtatcgctaaagaacttgatgtaaaagtaggggattggattaccttgcttatttctcagcaaaacggagatgaacaatttgctcaaccaactcgtgagccagtgcaagttaccgctattttacgcttagatggtcagcttgattatagttatgccttattgccgcttgctcaagcacaaacctttttgacttatcaacctgatcaaattacaggtgttgaattgaaattagatgatcctttttctgtgagaaatctggatttatcaatgcttaatgattatccgcagatgctatatatgcaaaattggattagtaaatttggttatatgtatcgcgatattcagcttattagaaccgtaatgtatatcgcaatggtgcttgtgatcggtgtggcatgttttaatattgtttctacgctgattatggcggtaaaagataagcagggcgatattgccattatgcgcacgcttggggcgaataatgcgtttatcaaacgtatttttatttggtatggcttacaggcaggaatgaaaggttgcttaattggaattgtgttaggcattatacttgcattaaatcttacaacttttattcaaggtattgagtgggttatcggtaagaaattattatcgggcgatgtgtattttgtggatttcttgccaagcgagttacactggttggatgttttgatggttttagttgcagcacttgcattgagtttaatggcaagcctttatccagcaagccgagctgctaaattacaacctgcacaagtattaagtagccattaa

SEQ ID NO: 3212 - protein, 416 aa, Haemophilus influenzae
MNTPFFISWRYQRGKQKNPLVALIAKFSAIGIALGVAVLIVGLSAMNGFERELNQRILAVVPHIEIFSVHQAKDPTIHHWQNLEKRLQQNPQIKGISPFVSFTALVENGSKLKVVQVKGVEKQAEDKVSSIGNFVQEQGWNKFEKEGGLVLGAGIAKELDVKVGDWITLLISQQNGDEQFAQPTREPVQVTAILRLDGQLDYSYALLPLAQAQTFLTYQPDQITGVELKLDDPFSVRNLDLSMLNDYPQMLYMQNWISKFGYMYRDIQLIRTVMYIAMVLVIGVACFNIVSTLIMAVKDKQGDIAIMRTLGANNAFIKRIFIWYGLQAGMKGCLIGIVLGIILALNLTTFIQGIEWVIGKKLLSGDVYFVDFLPSELHWLDVLMVLVAALALSLMASLYPASRAAKLQPAQVLSSH

SEQ ID NO: 3213 - DNA, 684 bp, Haemophilus influenzae
atgaataactatttattaaaatgcgaaaatatcaataaattttatcaagaaggcgaaaatcaaacgcaagtattaaaaggcgtttctttttctatggaacctgcagagttggttgcgattgtggggagttctggttcagggaaaagtactttattacatactttagggggacttgatcagccaagtagtggggaagtgtttattaatggacaatccttgcaaaaagcatcggctaatgaattagctgctttgcgtaatcgttatttaggatttgtgtaccaattccatcatttaatggcggattttaccgcacttgaaaatgtgatgatgccgatgttgattggtcatcaaaataaaactgaagcgaaagatcgcgctgaaaaaatgctaagtgcggtgggattaagccatagaattacccatcgtccttctgcgctttctggtggggaacgtcagcgtgtggcgattgcgcgtgctttagtgaataatccatcgttagttttagcggatgaacccacaggaaatctcgatcacaagaccactgaaagtatttttgagctgattcaacaacttaatcaagaacaaaatatcgcgtttttattagtcactcacgatatggggcttgcggaaaaattatcacgccgtttagttatgcaagatggtcttttgaaggagggggcgtga

SEQ ID NO: 3214 - protein, 227 aa, Haemophilus influenzae
MNNYLLKCENINKFYQEGENQTQVLKGVSFSMEPAELVAIVGSSGSGKSTLLHTLGGLDQPSSGEVFINGQSLQKASANELAALRNRYLGFVYQFHHLMADFTALENVMMPMLIGHQNKTEAKDRAEKMLSAVGLSHRITHRPSALSGGERQRVAIARALVNNPSLVLADEPTGNLDHKTTESIFELIQQLNQEQNIAFLLVTHDMGLAEKLSRRLVMQDGLLKEGA

SEQ ID NO: 3215 - DNA, 642 bp, Haemophilus influenzae
atgggaaaggttatttttatatctggcattgatactgatgtgggaaaaacgattgctacaggcatttatgctaaaaaattgatggaacaaggctgttccgtgattacacaaaaaatgattcaaacaggttgtaaaaatatcgctgatgatttacttgtgcatcgaaagattcaagggattgatttaacggaagaagatttacaaggcgaaacctgcccttatgtttttgaatatccttgttcgccacatttagctgcaaagcgagaaagtagaaaaattgaagcaaaaatcattgaaaaatctaccgcacttttggcagaaaaatatgattatgtgctgctagaaggggctggtgggttaatggtaccttattgcgaagaggcgacgacgttagattatatccagtcaaacaattaccctttgattttagtgacatcgggaaaattaggtagtattaaccacacattattaagtttagaggcctgtcgtactcgaggtatttcagtattaagtgtaatgtataacggttacccagaatatgatcctattattagtcaagaaacccaacgctatttaaaacgttatcttgaaaaacattttcctgaaacaggatttgaatactttgggtgtattgaaatttaa

SEQ ID NO: 3216 - protein, 213 aa, Haemophilus influenzae
MGKVIFISGIDTDVGKTIATGIYAKKLMEQGCSVITQKMIQTGCKNIADDLLVHRKIQGIDLTEEDLQGETCPYVFEYPCSPHLAAKRESRKIEAKIIEKSTALLAEKYDYVLLEGAGGLMVPYCEEATTLDYIQSNNYPLILVTSGKLGSINHTLLSLEACRTRGISVLSVMYNGYPEYDPIISQETQRYLKRYLEKHFPETGFEYFGCIEI

SEQ ID NO: 3217 - DNA, 783 bp, Haemophilus influenzae
atggaatcattaacttccgtagataaatcgcgtattcaacacgccttccaaaaagccttaaatagctatgatgaacatgcgttaattcaacaaaaaatgaatattaagttaatgacacatttgcaagattatttaccaaatgggtcactagatagtgttttggagcttggttgcgggtctggtatgttgagttcattgttgcaaaaacagatttcagcggattattggttatttaatgatttgtgcgatgtgcagacccaactggctgaaaaattgccgcaatcctttgatttttattgcggcgatgccgaacatttcctttttttgcaacaatttgacttaatcgcaagcgcatccgccgtgcaatggtttcaccaacccgacgcttttatcgcccattgcaaaacaggcttgaaaacaaacggattattggcggttgcaacctttggcgaagacaatttaaaagaagtccgccagatcacaaatataggcttaaattacccgactttatcccaatggcagacttggttagccaaagattttgagcttttatggtgtgaggattttaaggtaatactagagtttgatacgccgttagatgtactcaaacaccttaaatatacaggcgtaacagccacgaaccaaaaaaattggacaagaaaaaatctcaatggatttattggcgattacttgtcggcgttcagtatgccgtcgggcaaagtgcgtctgacttatcatccgttattttttatcgcgcgctattctcacatagaaaatcagtaa

SEQ ID NO: 3218 - protein, 260 aa, Haemophilus influenzae
MESLTSVDKSRIQHAFQKALNSYDEHALIQQKMNIKLMTHLQDYLPNGSLDSVLELGCGSGMLSSLLQKQISADYWLFNDLCDVQTQLAEKLPQSFDFYCGDAEHFLFLQQFDLIASASAVQWFHQPDAFIAHCKTGLKTNGLLAVATFGEDNLKEVRQITNIGLNYPTLSQWQTWLAKDFELLWCEDFKVILEFDTPLDVLKHLKYTGVTATNQKNWTRKNLNGFIGDYLSAFSMPSGKVRLTYHPLFFIARYSHIENQ

SEQ ID NO: 3219 - DNA, 648 bp, Haemophilus influenzae
gtgaaaacgaaattttatgatcatcaaggtgagcatttaatagtttattttgctggctgggggacacctcttgatgctgtagctcatttgattttgccaacagatcatgatttattaatttgctatgattatcaagatttaaatttggattttgatttttccgcctatcggcacatccgtttggtggcgtggtctatgggcgtttgggcggcagagagggcattgcaaggaataagattaaaatccgcaacggcagtgaatggcacaggtttgccctgtgatgacaattttggcattcctgacactatttttaaagcgacactggacaatctcacagaaaatacccgtttaaaatttgaacgcagaatctgtggcgataaagcatcttttgaacgttaccaactatttcccgcccgtccgtttgacgaaattcatcaagaacttaccgcactttttgcgatgattcagcaggataaacgcatagatcttattcactgggcaaatgcatgggttagttctcgcgataaaatttttacgccagctaatcagcaccaatattgggcatcccgttgtgcgattcgggaaatagagggtgagcattatgtgttttcaagatttacccactggtcggcattatggaatcattaa

SEQ ID NO: 3220 - protein, 215 aa, Haemophilus influenzae
MKTKFYDHQGEHLIVYFAGWGTPLDAVAHLILPTDHDLLICYDYQDLNLDFDFSAYRHIRLVAWSMGVWAAERALQGIRLKSATAVNGTGLPCDDNFGIPDTIFKATLDNLTENTRLKFERRICGDKASFERYQLFPARPFDEIHQELTALFAMIQQDKRIDLIHWANAWVSSRDKIFTPANQHQYWASRCAIREIEGEHYVFSRFTHWSALWNH

SEQ ID NO: 3221 - DNA, 1143 bp, Haemophilus influenzae
atggatgctttcaaacagcaactggaacagctttgtacacaaaatcaatatcgttcaattccagatttagttcatcaaggacgatatattacgcgagaaaatcgcaaaatgctgaatatgtcatctaatgattatttaggtttggcatcaaatgaaaacttgcgccagtcttttttacagcaatacggcggtaatttcccctcttttaccagttcttcatcgcgtttattaacgggcaactttcctatttataccgatttggaagagcttgtcgcacaacgtttccaacgggaaagtgcgttattatttaacagcggctatcacgccaatatcggcattttgcctgctttgacgacgacgaaaagtttaattttggcagataaattagtgcatgccagcatgattgatggcattcgtttaagccaatgtgagttctttcgttatcgtcataatgattatgaacatctaaagagtctgctcgaaaaaaatgctggaaaatttgaccgcacttttatcgttaccgaatctgttttcagtatggacggcgacatggcggatttgaaacagcttgttcaattaaaaaaacaatttcccaatacttatctttatgtggatgaagcccacgccatcggtgtttatgggcaaaacggattgggtattgccgaacgggataatctgattgccgaaattgatttattggttggcacttttggcaaggccttagcttcaatgggggcttatgtcgtctgtgatcaaatattaaaagaatgtttgattaatcaaatgcgtccattgattttttcaaccgcacttccgccctttaatgtggcttggactcattttatttttgaacgattgccacaattttcaaaagaaagaactcatcttgagcagttaagtgcatttttacgccaagaagtggaacacagaacgcaaataatgccaagccaaacttgcatcgttccctatattttaggcgagaacgaagcaacccttgctaaggcgaaagatctgcaagagcaaggttattattgcttgccgattagaccaccgacagtaccaaaaggtacatccagaatacgattgtctttgacggtagatatgacaatggatgaagtgaaacagtttgtggcatgcttataa

SEQ ID NO: 3222 - protein, 380 aa, Haemophilus influenzae
MDAFKQQLEQLCTQNQYRSIPDLVHQGRYITRENRKMLNMSSNDYLGLASNENLRQSFLQQYGGNFPSFTSSSSRLLTGNFPIYTDLEELVAQRFQRESALLFNSGYHANIGILPALTTTKSLILADKLVHASMIDGIRLSQCEFFRYRHNDYEHLKSLLEKNAGKFDRTFIVTESVFSMDGDMADLKQLVQLKKQFPNTYLYVDEAHAIGVYGQNGLGIAERDNLIAEIDLLVGTFGKALASMGAYVVCDQILKECLINQMRPLIFSTALPPFNVAWTHFIFERLPQFSKERTHLEQLSAFLRQEVEHRTQIMPSQTCIVPYILGENEATLAKAKDLQEQGYYCLPIRPPTVPKGTSRIRLSLTVDMTMDEVKQFVACL

SEQ ID NO: 3223 - DNA, 1293 bp, Haemophilus influenzae
atgatggatgaacaatcacttttagcttttgatacacaacatatttggcatccttattcttcagtttcttctgatatgccgctttatgcggtggaacgtgctgatggcgtaatgataactttaaaagatggtcgtcgtttgattgatgggatgtcctcttggtgggcggcgttgcacggttataatcatcctcgtttaaatgcggcggcacagaatcaattagcaaaaatgagccatattatgtttggcggatttacccatgaccctgcggtggaattagctcaattattggtacaaattttgcccaatggattagataagatcttttttgctgatagtggttctgttgctgtggaagtagcaatgaaaatggctattcaatatcagcacgctaaaggagaagtgcaacgacaaaaatttgccactattcgttctggttatcacggcgatacttggaatgcgatgtcagtgtgtgatccaaccacagggatgcatcatttatttcatcatagcctgcctgtacaatattttcttcctcaacccaacattccatttaatgaatcttggaatgattgtgtcattgaacctttagctgatttacttgaacgaaaaggtaatgaaatcgccgcactgattttagaacctgttgtgcaaggtgcgggcggtatgtatttttattcgccaacttatttagtgaaagcgcaagcactttgtaaacaatatggcgttttgctgatttttgatgaaatcgccacgggatttggtcgtacagggaaattatttgcagccgagcatgctgggatttcgccagatattatgtgtatcggtaaagccttaacaggtggttatttaactttatctgcaagcattacgaccactgaaattgcgcaaattatttgtcgcggtgaggctaaatgctttatgcacgggccaacttttatggcaaacccgttggcttgtgcgattgcggcagaatctatccgtttattgttggaaagcccttggcagcaaaatattcagcgaattgagcattccttaaaacagcagctttcgcctttatctgaaaaagattacgtcaaagaagttcgtgcattaggggcgattggggtggttgaaatgaaaagtgcggtaaatatgaaaaccttagtcccacgttttgtggaacaaggtgtttggattcggcctttcggaaaattggtttatgttatgccaccatttgtgattaaagatgatgaacttcagaaattaacggaaggcatgattttggctttaacgcaggaatatgaacattag

SEQ ID NO: 3224 - protein, 430 aa, Haemophilus influenzae
MMDEQSLLAFDTQHIWHPYSSVSSDMPLYAVERADGVMITLKDGRRLIDGMSSWWAALHGYNHPRLNAAAQNQLAKMSHIMFGGFTHDPAVELAQLLVQILPNGLDKIFFADSGSVAVEVAMKMAIQYQHAKGEVQRQKFATIRSGYHGDTWNAMSVCDPTTGMHHLFHHSLPVQYFLPQPNIPFNESWNDCVIEPLADLLERKGNEIAALILEPVVQGAGGMYFYSPTYLVKAQALCKQYGVLLIFDEIATGFGRTGKLFAAEHAGISPDIMCIGKALTGGYLTLSASITTTEIAQIICRGEAKCFMHGPTFMANPLACAIAAESIRLLLESPWQQNIQRIEHSLKQQLSPLSEKDYVKEVRALGAIGVVEMKSAVNMKTLVPRFVEQGVWIRPFGKLVYVMPPFVIKDDELQKLTEGMILALTQEYEH

SEQ ID NO: 3225 - DNA, 1182 bp, Haemophilus influenzae
atgaattttcctatttctctttatatcgccttgcgttattggcgtgcgaaaagtgcggatcgttttgggcgattagtgactaatcttgcaagcctggggattgtgctaggtgtgatggcattgatcatcgtgctttcggtgatgaatggattagaaggttaccaaaaacaacaggtgctatcttctattcctcatgcgattgtgagcgaagaacagcctatttctacagaaaaaacgctagaaaatttaccgcactttgtccaaaaagccgtgccgatcaatacaacaaatgtgatttatcaaacggcaaaaggcgtgagtgcaggacaaattataggtattcaattattttctgatgatcctttggttgaatcttttgatcagactaaatttaacgaaattttacctagtggggagtttaaactggtcatcggcgatcaactggcacaaaaactgggcgtgaatattggggataaaatccgtttgatgattacggaaaatagccaatatacaccattcggtcgggtgccaatgcagcgtttgtttactgttagcgatatttattatggttatggcgaagcatctggttacgaagcctttactaatattacagatattggtcgcttaatgcgtattcaacctcagcaagcgcagggctatcgtttatttctgaatgatccgttccaaattacagaactcccacaacatttcccgacacaaaaaatcacagattggcgtgtgcaaaaaggcgaatttttccaagcagtgagaatggaaaaaaatatgatgggattgctgattagtttgattattgttgtggcgatttccaatattgtcacctctttaagtttgatggtggtggataaacaaggggaaattgcgattttgcaaactcaaggcttaacaaaatcccaagtgcgttcagtgttcatttatcaaggattactggtgggatttgttggcacattgctcggtgctattttaggtgttttagctacgttgaacttaacagagattgtaagtgcggtaaatcctcaaggtgttttcttgccgacagaattatcctttgttcaaatgatttttgtcattggattttcgctgttactttccttgctttcaaccctttatcctgcttatcgagctgcgaaagtagaacctgcagcagctttgagatacgagtaa

SEQ ID NO: 3226 - protein, 393 aa, Haemophilus influenzae
MNFPISLYIALRYWRAKSADRFGRLVTNLASLGIVLGVMALIIVLSVMNGLEGYQKQQVLSSIPHAIVSEEQPISTEKTLENLPHFVQKAVPINTTNVIYQTAKGVSAGQIIGIQLFSDDPLVESFDQTKFNEILPSGEFKLVIGDQLAQKLGVNIGDKIRLMITENSQYTPFGRVPMQRLFTVSDIYYGYGEASGYEAFTNITDIGRLMRIQPQQAQGYRLFLNDPFQITELPQHFPTQKITDWRVQKGEFFQAVRMEKNMMGLLISLIIVVAISNIVTSLSLMVVDKQGEIAILQTQGLTKSQVRSVFIYQGLLVGFVGTLLGAILGVLATLNLTEIVSAVNPQGVFLPTELSFVQMIFVIGFSLLLSLLSTLYPAYRAAKVEPAAALRYE

SEQ ID NO: 3227 - DNA, 948 bp, Haemophilus influenzae
atgaaaatcgtatttttagatagcacggctattcctaaacatatttcaattcctcgcccaagttttgaacatacttggactgaatatgatcatacgtcttctgccgaaaccattgagcgagcgaaagatgcggacattgttattaccagcaaagtcatttttgatcgtgaaactttgcaacaactgccaaaattaaagctgattgccattactgcgacaggtacaaataatgttgatcttgtggctgcagaagaaatgggcattgccgtgcgtaatgtgacaggttattccagtacaaccgtgccagaacacgtaatgggtctgattttttctttaaaacacagtttggcaggttggttacgcgatcaaacggaagcaaaatgggcggaaagtaaacaattttgttattttgattatccaattacagatgtgcgcggttcaacgttgggtgtatttggtaaaggttgcctaggaacagaagtggggcgtttggctaatgccgtgggaatgaaagtactttatgcagaacataaagatgctactgtttgccgtgaaggttatacgccctttgatgaagtattaaaacaagcggatattgtgacgttgcattgcccattaacggaaacaacaaagaatttaattaatgcagaaaccttatccaaaatgaaaaaaggtgcatttttgattaatacagggcgtgggcctttgattgatgaacttgccttagttgatgcgttaaaaacggggcatttaggcggagcggctttggatgtaatggtaaaagagccaccagaaaaagataatccgttaattttagctgcaaaaacgatgcctaatttaattatcaccccgcatattgcttgggcgagcgatagtgcagtgacaacattagttggcaaagtaatgcaaaacatcgaagaatttgtacaacaattacatcaaaaataa

SEQ ID NO: 3228 - protein, 315 aa, Haemophilus influenzae
MKIVFLDSTAIPKHISIPRPSFEHTWTEYDHTSSAETIERAKDADIVITSKVIFDRETLQQLPKLKLIAITATGTNNVDLVAAEEMGIAVRNVTGYSSTTVPEHVMGLIFSLKHSLAGWLRDQTEAKWAESKQFCYFDYPITDVRGSTLGVFGKGCLGTEVGRLANAVGMKVLYAEHKDATVCREGYTPFDEVLKQADIVTLHCPLTETTKNLINAETLSKMKKGAFLINTGRGPLIDELALVDALKTGHLGGAALDVMVKEPPEKDNPLILAAKTMPNLIITPHIAWASDSAVTTLVGKVMQNIEEFVQQLHQK

SEQ ID NO: 3229 - DNA, 855 bp, Haemophilus influenzae
atgcaaaataaaattgtaaaaattggcaatattgatgttgcaaacgacaaacctttcgtgctttttggcggaatgaacgtgttggaaagccgtgatatggcaatgcaagtgtgcgaagcttatgtgaaagtgacagagaaacttggcgtgccttatgtatttaaagcgtcttttgacaaagcgaatcgttcatctattcattcttaccgtggacctggcatggaagaaggattaaaaattttccaagaattaaaagatacattcggggtaaaaattattaccgatgtacacgaaatttatcaatgccagcctgttgctgatgtggtggatgtgattcaattaccggcattcttggctcgtcaaaccgatttagtcgaagccatggcaagaactggtgcggtaattaacgtgaaaaaaccacaattcttaagcccaggtcaaatgggtaatatcgtggataaatttgaagaatgtggtaatgataaaattattctttgtgatcgaggttcaaacttcggttacgataatttaattgttgatatgcttggctttagtgtaatgaaaaaagcctctaagggtagccctgttatttttgatgtaacccattcacttcaatgccgtgatccatttggggcggcatcgagtggtcgtcgtgcgcaagtaaccgaattagcgcgttcaggtttagcagtaggaattgcaggtttatttttagaagcgcatccaaatccaaatcaagcaaaatgtgatggcccttctgcattgccactttctgcgcttgaaggctttgtttcccaaatgaaagccatcgatgatttagtaaaatcttttccagaattggatacttcaatttaa

SEQ ID NO: 3230 - protein, 284 aa, Haemophilus influenzae
MQNKIVKIGNIDVANDKPFVLFGGMNVLESRDMAMQVCEAYVKVTEKLGVPYVFKASFDKANRSSIHSYRGPGMEEGLKIFQELKDTFGVKIITDVHEIYQCQPVADVVDVIQLPAFLARQTDLVEAMARTGAVINVKKPQFLSPGQMGNIVDKFEECGNDKIILCDRGSNFGYDNLIVDMLGFSVMKKASKGSPVIFDVTHSLQCRDPFGAASSGRRAQVTELARSGLAVGIAGLFLEAHPNPNQAKCDGPSALPLSALEGFVSQMKAIDDLVKSFPELDTSI

SEQ ID NO: 3231 - DNA, 804 bp, Haemophilus influenzae
atgaaatattatcgacgtgcgttatacgataaatttgtgcatttttatcttgttatctctgatgatggcagtttagaagcacaacttcggggaaaaatgggtgggcttgtgcgtaaagcgcgtaaagaaatttcgccagattggtcgaaagaagagcagattcatcagttactacagctattttatggtgattggggctttcattgcgatccagaagattatttttatgctcgtaatttatatttgccttatgtgtttcaaaatcgtcaaggtatgccagtgactcttggggcgatagtgctttatttagctgacgtattagatttaccaatttatcctgtcaatttcccaacacagctaattttacgtgccgaagtaagagatgaagtggcttttattgatccttgggatggcacttatatatcgcaagaaaaattgcagcaactttatgaaggtgcatttggatttggggagaaaattcaacccgaagaacttgatagagccgatctttctttactttattctcgctttgagcaactggcgaaaaatgcgcttattcgtgaagagcataacgatatggcataccactatattaagaatttaatgattactgatgctgaaaatccttatcatatccgtgaccgtggcttagttttagctcaaatgggggcttatccttcagcattgaaagatttagaattttttgtggaacattgtccaaaagatccaacggcggcgtttatccgcacgcaacttttagaacttaaaggcgagattaataaagatacttttcccctccattga

SEQ ID NO: 3232 - protein, 267 aa, Haemophilus influenzae
MKYYRRALYDKFVHFYLVISDDGSLEAQLRGKMGGLVRKARKEISPDWSKEEQIHQLLQLFYGDWGFHCDPEDYFYARNLYLPYVFQNRQGMPVTLGAIVLYLADVLDLPIYPVNFPTQLILRAEVRDEVAFIDPWDGTYISQEKLQQLYEGAFGFGEKIQPEELDRADLSLLYSRFEQLAKNALIREEHNDMAYHYIKNLMITDAENPYHIRDRGLVLAQMGAYPSALKDLEFFVEHCPKDPTAAFIRTQLLELKGEINKDTFPLH

SEQ ID NO: 3233 - DNA, 879 bp, Haemophilus influenzae
atgaattataaagaatggttggcacaagcgattgcggatttagcacaaaaaaatcccactgaaaatagtaaaattgatgcacttgtgcttcttcaacatgctactggcaaattgcgtacgcaaatccttgcttttgatgatactgagattgatgaaaaagtgcggttaaaattgaccgcacttttagatcgtcgtctaaaaggcgaacctatcgcctatattcttggcgaaaaagaattttggtcattgccgttaaatgtctcaaaaggcaccttgattccaagaccagatactgaaattctcgtagagaaagcattacaaattgcgttagaaaaattggaagaaaatccaccgcactttcgtattcttgatcttggcacaggcacaggcgcaatcgccctcgctttggcttccgagcttgcacccatttgccaaaagcggcatattccgctggaaataattggtgttgatcttatgcccgatgttgtggcattagctcaatctaatgcagaaagaaatcagctaaatgtccaatttttgcagagccgttggtttgataatataacagggaagtttgatcttatcgtcagcaatccgccttatattgatgtgcaagatgaacatttgcatcaaggcgatgtgcgttttgaacccctttctgcattagttgccaatgatgaggggtatgctgatttacgtcatattattgaattagcatcgagttatttgaattctaatggcgtattattgcttgaacacggatggcaacaaggcgaaaaagtgcggtcaattttcctagaaaatcattgggaaatggttgaaactgtgcgtgattatggcgacaatgagcgcgtcactttaggtttttggaagaagtaa

SEQ ID NO: 3234 - protein, 292 aa, Haemophilus influenzae
MNYKEWLAQAIADLAQKNPTENSKIDALVLLQHATGKLRTQILAFDDTEIDEKVRLKLTALLDRRLKGEPIAYILGEKEFWSLPLNVSKGTLIPRPDTEILVEKALQIALEKLEENPPHFRILDLGTGTGAIALALASELAPICQKRHIPLEIIGVDLMPDVVALAQSNAERNQLNVQFLQSRWFDNITGKFDLIVSNPPYIDVQDEHLHQGDVRFEPLSALVANDEGYADLRHIIELASSYLNSNGVLLLEHGWQQGEKVRSIFLENHWEMVETVRDYGDNERVTLGFWKK

SEQ ID NO: 3235 - DNA, 441 bp, Haemophilus influenzae
atgatcattgaaaatcaaaaagatgctgaattttcttctactttcaaaccttctcaacctgctcaagccagccgttttaaacgttggcttgcgagtatgattaatgggcttgtgctttgggtgatggttggtctcggttttgcattgggggattttgccggtgtagtggggacgattgtatatgctggttttcagttatatttcatgaaaacttatggtcaaacaatggcaaaacgctggttaggcttgcgcgtatttaattatcatatcaatcagcctgttgaatttggtaaatacatcggtcgtgagattattgatattttattggcatggacaagtttcttattgattattagcggtattgttgcacttgtgcgcgatgatcgtcgttctttaacggatttagtggctggcacgattgtgttaaaagacgaaaaataa

SEQ ID NO: 3236 - protein, 146 aa, Haemophilus influenzae
MIIENQKDAEFSSTFKPSQPAQASRFKRWLASMINGLVLWVMVGLGFALGDFAGVVGTIVYAGFQLYFMKTYGQTMAKRWLGLRVFNYHINQPVEFGKYIGREIIDILLAWTSFLLIISGIVALVRDDRRSLTDLVAGTIVLKDEK

SEQ ID NO: 3237 - DNA, 1086 bp, Haemophilus influenzae
atgatgaaagattccattattgcaaaattagaaagtttaaaagaacgttatgaggagctagaagccttattgggcgatgtttctgtaattagtgatcaggataaattccgtgcgtattctaaagaatattcgcaacttgaagaagtggtgaaatgttttaatcgctggacgcaattaaatcaaaatattgaagaagctgaaatattgctcgacgatcctgaaatgaaagaaatggcgcaaatggaaattgaagaatccaaagcggaaattgaagaagtggaacaacaacttcaaattcttttactgccgaaagatcctaatgatgaatataactgctatttagaaatccgtgcgggaacaggcggtgatgaagcgggtatttttgccggtgatttattccgtatgtacagtcgttatgctgaaagtaaacgctggcgcgtagaaatgctcagtgctaacgaaagtgagcaaggcggttataaagaggtgattgttaaagtcactggcgaaggtgtgtatggccagcttaaatttgaatcgggcggtcatcgtgtgcaacgtgtaccaaaaacagaaagtcaagggcgtattcatacctctgcttgtaccgtcgcggtaatgccagaattgcctgaatctgaaatgccagaaattaatccagcagatttacgtattgatacttatcgttcatcaggcgctggtggtcagcacgtaaatacaacggattctgcggtgcgtattacacatattccaacaggcattgttgtggaatgtcaggatgagcgttcacagcacaaaaataaagcgaaagcaatgtcggtattagcgtcacgtattgttcaagcagagcaagaacgccaagctgcagaacaaacagatatgcgccgtaacttattaggttcgggcgatcgttctgataaaattcgtacttataattatccgcaaggtcgagtaaccgatcaccgtatcaatctcactatttaccgtttggatgaagtaatgaatggtaaaattgatgaactgattcagccgattattaccgaatatcaagcggatcagttggctgcattgtctgaacagaattaa

SEQ ID NO: 3238 - protein, 361 aa, Haemophilus influenzae
MMKDSIIAKLESLKERYEELEALLGDVSVISDQDKFRAYSKEYSQLEEVVKCFNRWTQLNQNIEEAEILLDDPEMKEMAQMEIEESKAEIEEVEQQLQILLLPKDPNDEYNCYLEIRAGTGGDEAGIFAGDLFRMYSRYAESKRWRVEMLSANESEQGGYKEVIVKVTGEGVYGQLKFESGGHRVQRVPKTESQGRIHTSACTVAVMPELPESEMPEINPADLRIDTYRSSGAGGQHVNTTDSAVRITHIPTGIVVECQDERSQHKNKAKAMSVLASRIVQAEQERQAAEQTDMRRNLLGSGDRSDKIRTYNYPQGRVTDHRINLTIYRLDEVMNGKIDELIQPIITEYQADQLAALSEQN

SEQ ID NO: 3239 - DNA, 213 bp, Haemophilus influenzae
ttgccaaaacaagcagatcttcaagaaaaaattgaagcaattaaagaagaattggtgttaagcaaagatccgaaagtgttcattaagctaggtgagttggaaaaagataaatccaaagccaaaaaatactttggcgatgcttgcgatttacgtagtcaagaagggtgtgataaatatcgtgagctcaatcaaaaacaagacaccaataaatag

SEQ ID NO: 3240 - protein, 70 aa, Haemophilus influenzae
MPKQADLQEKIEAIKEELVLSKDPKVFIKLGELEKDKSKAKKYFGDACDLRSQEGCDKYRELNQKQDTNK

SEQ ID NO: 3241 - DNA, 537 bp, Haemophilus influenzae
atggaacataaattagaagatattattgcaatttttaatcaatgttttgaagaggaatacaacactcgcttagtcaaaggcggtgatgagcccatttatttgcccgcaaatgatgaagtgctttataatgcgatttattttgcgcgaggcttttacagcagtgcattgcacgaaattgcccattggttagtggcaggcaaagaacgtcgtaaactagaagattttggttattggtatgagccagatggacgttctgaagaacgccagcgtgactttgaaaaagttgaagttaaaccgcaagcattagagtggattttggcaacggcggcaggttttcgttattttgccagcgcggataatttgaatggcaatccgggcgatacacagccttttaaacaagccgtgtatgaacaagtgaaaatctatgcggaaaaaggtttaccaaaacgagcggaaatgttacgcaaggcgttagtggcattttatggcacagaagatgaaattgatctggcgaagtttgatgtcatgtgtatttaa

SEQ ID NO: 3242 - protein, 178 aa, Haemophilus influenzae
MEHKLEDIIAIFNQCFEEEYNTRLVKGGDEPIYLPANDEVLYNAIYFARGFYSSALHEIAHWLVAGKERRKLEDFGYWYEPDGRSEERQRDFEKVEVKPQALEWILATAAGFRYFASADNLNGNPGDTQPFKQAVYEQVKIYAEKGLPKRAEMLRKALVAFYGTEDEIDLAKFDVMCI

SEQ ID NO: 3243 - DNA, 501 bp, Haemophilus influenzae
atgataggcactaaaatctatctcgcattatacaaaggtaaaaaaacgggtaaaaacccgaacgcacttttggcacgtttgagtgactggctcactcgtaaattgacaaaaggcgtgtattcgcattgtgaaattgcagtaatgaaagaagtatttttcagtgggcatcactatgaaacagaagtgatgtacgagtgttattcgtcttcaattcgagacggtggcgtgcgttgtaagcaaattgatgtttatgatagagaaaaatgggagttaattgagctagagggagttaccgaagcacaaatcaaagcctattttgaccgcactttgggctgtaaatatgactggtggggtgcgttaggtatcgtactaggcatcaaacaaaaacgctcaaaatatttttgcagtgaatggtgttttaatgcgatttgcggtggggaaaatggttggcggtttagtccgaatcaactagcggctatatttaataaagagaaaagttaa

SEQ ID NO: 3244 - protein, 166 aa, Haemophilus influenzae
MIGTKIYLALYKGKKTGKNPNALLARLSDWLTRKLTKGVYSHCEIAVMKEVFFSGHHYETEVMYECYSSSIRDGGVRCKQIDVYDREKWELIELEGVTEAQIKAYFDRTLGCKYDWWGALGIVLGIKQKRSKYFCSEWCFNAICGGENGWRFSPNQLAAIFNKEKS

SEQ ID NO: 3245 - DNA, 603 bp, Haemophilus influenzae
atgaaagcctattttttaaaagaaaatttgaatagttatcaaattttccctattccgcaaaacttaaatgattttgtggaaatggaagtagaaaacgaatcagagcttgagactaaacaacttattgattttaaaagtcaatacattctagttgatagacaaccaacagaatttcacaaatggaacggaaacagctggattgtcgataaaaaaaagaaaactgaaattaagcgtgaactcattaaaaatctagttgatagcattgatgatacagcggcgaacattagttctagatggacaaggtttgccgaagagtataaggagcgagaagctgccgctattgcctttaaagaagcaaattttgctggagaagtaagcgtttatattagcagttttgcaacggttgcgggtcttgataatcagtctgcgtcacttttgattcttcagcaagcagaaagattacgtgcattgcaacaacaattagcagtgcaaagaatgcgtaagtatgagttaaagcatgaggcgttgagtgatgaagaactgaaaaacattcatgacgatattgtttcaaaaatgcgacaactagcggaggcacaacaatga

SEQ ID NO: 3246 - protein, 200 aa, Haemophilus influenzae
MKAYFLKENLNSYQIFPIPQNLNDFVEMEVENESELETKQLIDFKSQYILVDRQPTEFHKWNGNSWIVDKKKKTEIKRELIKNLVDSIDDTAANISSRWTRFAEEYKEREAAAIAFKEANFAGEVSVYISSFATVAGLDNQSASLLILQQAERLRALQQQLAVQRMRKYELKHEALSDEELKNIHDDIVSKMRQLAEAQQ

SEQ ID NO: 3247 - DNA, 666 bp, Haemophilus influenzae
atgcatccgctattagatagcccaatggcaacaggtggaaatgaaactcgtcctaaatcattaatcctcaaattatgcatcaaagcaaaaaacacatttgatgacgtgcaattctgggtgaaggcattcggtgttgttgaaaatgctggggctttagatgcgggtacacttgcacaaaatatgcaagcgttatctgagagtgttaaacaaaaaatagaagagaataaacaatcaactttgcgagaaatcaccaatgcaaaagttgatataaatcagcaatttttgcaggcaaaacaggatttatctcaaattggcacattaaaaaaagtctgggaaggtaacgtgaattctgggcaaattactctatcagagaagtgcttcggtaaaacgttaattttatatcttcaatcatcagaaaggcacaggcttgatgataataacgatattgaactcgtcagttttgaagtgggtgcagaaattgaaggtaaaacaggaggcggagttcattggcttgatgttcgtcaagtacgaggatttccccgtaatggttcatttttgaattatgtagaagtcaagacattcgctgtgactgttgatagaaacggtacaacaatacaaattcaagatcttgctggtcgttttgtaaaacgcattgatattcgataa

SEQ ID NO: 3248 - protein, 221 aa, Haemophilus influenzae
MHPLLDSPMATGGNETRPKSLILKLCIKAKNTFDDVQFWVKAFGVVENAGALDAGTLAQNMQALSESVKQKIEENKQSTLREITNAKVDINQQFLQAKQDLSQIGTLKKVWEGNVNSGQITLSEKCFGKTLILYLQSSERHRLDDNNDIELVSFEVGAEIEGKTGGGVHWLDVRQVRGFPRNGSFLNYVEVKTFAVTVDRNGTTIQIQDLAGRFVKRIDIR

SEQ ID NO: 3249 - DNA, 1398 bp, Haemophilus influenzae
atgaaaagtttaatgcctcaaattgattccaatgacggcctttttcacaatggtaatccagcaacaggcgaacaaggcacgcgagtaaccgatacgtggcttaataatttgcaagaccgagtacgtgatatacaagcggaagcgcattatgtgttgcaaaaagcggggtttaccccgaaggcagaaacacaaacgcagttatatcaagcgattgtgaagattattgatgataaccgaaagacggcaagtttaactcaaaaaggcgaagttcagcttagttcgtccactaacagcgacagcgaaaccgaagctgcaacatcaaaagccgtgaaaaccgcctatgacaaagcagtagaagccaaaactgccgcagagagcaaagtgggattaaggggcaatgaatcgattcaaggtaccaaaagttttgaatctaaaatcattgggtttcgtggcattggggtggctgattcgcaaacttatgcaaatgctaatcatctcttaaatatgggggcgaatgatggcgacggctggatagagtataaaaaaaataaccgagctatcggcaccattcgtattcgggcaaatggggaattgtcatataacaatcaaaaaatctaccacgctggggcaaaaccccaatttaatacggatattgaaggcaagcctaatacacttgcaggctatggtattgggaattttaaagtagaacaagggcagggcgatgccaatggctataaaaccgatggcaattattacttagcaagcggtcaaaatctacccgaaaatggggcatggcatattgaagtagtgagcggtggggcaacaaatgcggtgcgtcaaattgcacgtaaagcaaatgataacaaaatcaaaacacgcttttttaatggctcaaattggtcagaatggaaagagacaggcggcgacggcgtgcctattggtgcggtggtgtcattccctcgtgcggtaactaatcccgtcggttttttacgtgctgatggttcgacgttcaacgccaaaacctttcccgatttataccgcactttgggcgacagcaaccaacttcctgatttaacccgtagtgatgtggggatgacggcttattttgccgtggataacattcctaacggctggattgcctttgattcaatcagaacaaccgttacacagcaaaattaccccgagttatatcgtcacttagttggtaaatatggttctatttcaaatgtgccattagctgaagaccgatttattagaaatgcatcaagcaatttatctgttggtgaaacgcaaagtgacgagattaaaaagcacgttcacaaagtgagaacacactgggttaattcaagtgatagtaatattttttatgacaaaacgaaaacagttatagattcatga

SEQ ID NO: 3250 - protein, 465 aa, Haemophilus influenzae
MKSLMPQIDSNDGLFHNGNPATGEQGTRVTDTWLNNLQDRVRDIQAEAHYVLQKAGFTPKAETQTQLYQAIVKIIDDNRKTASLTQKGEVQLSSSTNSDSETEAATSKAVKTAYDKAVEAKTAAESKVGLRGNESIQGTKSFESKIIGFRGIGVADSQTYANANHLLNMGANDGDGWIEYKKNNRAIGTIRIRANGELSYNNQKIYHAGAKPQFNTDIEGKPNTLAGYGIGNFKVEQGQGDANGYKTDGNYYLASGQNLPENGAWHIEVVSGGATNAVRQIARKANDNKIKTRFFNGSNWSEWKETGGDGVPIGAVVSFPRAVTNPVGFLRADGSTFNAKTFPDLYRTLGDSNQLPDLTRSDVGMTAYFAVDNIPNGWIAFDSIRTTVTQQNYPELYRHLVGKYGSISNVPLAEDRFIRNASSNLSVGETQSDEIKKHVHKVRTHWVNSSDSNIFYDKTKTVIDS

SEQ ID NO: 3251 - DNA, 597 bp, Haemophilus influenzae
atgatgcaaactgaccacaaaaaggtattggcaaaactttatccgcctatttcgtacgacgttaatggcgaacgttttttagcgcaatgtgaggtggatggtaatgcctttgaccgattacaaaaaagtgcggtggatttattgcaaattattgaacctgccacctccgataccatgttgtccgattgggaacgtttatgcggcataaaaacagattatagcaataactatcaagcacgagtaaaacgtgtcattgccaagttaaatgcgattgggggcttatccattccctattttaaacggattgcggaaagtattggatatcgcatcgaaattaaagagttttctccccttgcgaatgatttaccaacaacgggagatttggctcaatttcgcaatgaagcacgtgataacttgatttttatgtggcgagtatcggtgcttaatggagatgacaatattgtgtattttcgtgcaggtagctcctttgcaggtaatcatttagtggaatttggcgacccgattattgaggagttcttccgagatttaaaacctgcacatacttactgttattttgcttatcaaacaggatcttaa

SEQ ID NO: 3252 - protein, 198 aa, Haemophilus influenzae
MMQTDHKKVLAKLYPPISYDVNGERFLAQCEVDGNAFDRLQKSAVDLLQIIEPATSDTMLSDWERLCGIKTDYSNNYQARVKRVIAKLNAIGGLSIPYFKRIAESIGYRIEIKEFSPLANDLPTTGDLAQFRNEARDNLIFMWRVSVLNGDDNIVYFRAGSSFAGNHLVEFGDPIIEEFFRDLKPAHTYCYFAYQTGS

SEQ ID NO: 3253 - DNA, 1065 bp, Haemophilus influenzae
atgtttattgtgccgagtttagcagatattcgccaagcgattttgcgcgatgtgcagtcattagagccgagagccgatgtgagcatagatagtgactattatgcacgtgccagtagccttgctgccgtagcggaagggatttacgcccatcaaaaatggattattaaacaattctttcccgatactgccgacacggattttcttgaaaaacatgctggtttgcgtggtattcgccgtcgtaatgcgacttatgccagtgggcgtggtgcaactgtaactggtacccctgatacagtacttaaagctggattacaaattaaaacagacgataaccgattttatgaaaccactgaaagtgcggtgatttctgcaagcggttctgccgttgttgccgtgcgaagtcttgcgacaggtgcaagccaaaatattaaaactgcgacaaaagcaaactttatggcggcacctttaggcgtgcaatccaatgtggtgctcaatgaggtaattggtgcaacggatgcggaaagcgatgcgtctttgcttgaacgcttgcttgagattattcgccgaccacctgcagggggtaatcgttatgactatcgtacatgggcgttatcggtggatggcgtggatgcggcttatgtttacccgttgcgtcgtgggcttggtacggtagatattgcgattacatcaaataacgatgtgccaagcgatgaaacaataggtcgctgccaagcatatattgatgatgtgcgcccagtaaccgcgcgagaaagcaaagtggtaaaacctgatgtaacaaaagtcaattttaatattcaggtaaaaatcagtggcgtgaccttccccgaaattaaggcagcgatttccaccgcacttgcggattattttaatacgttaatcccaggcgatgatttgattgtgtcgcaatgtgaagcggtagtgaataacttggtcggtgtggttgatcgtaagtttacagcacctatcactaatctaaaagcagatgtgcgtacaaaaattgagtggtttcgattaggtcaaattaccgttacggagatggcatga

SEQ ID NO: 3254 - protein, 354 aa, Haemophilus influenzae
MFIVPSLADIRQAILRDVQSLEPRADVSIDSDYYARASSLAAVAEGIYAHQKWIIKQFFPDTADTDFLEKHAGLRGIRRRNATYASGRGATVTGTPDTVLKAGLQIKTDDNRFYETTESAVISASGSAVVAVRSLATGASQNIKTATKANFMAAPLGVQSNVVLNEVIGATDAESDASLLERLLEIIRRPPAGGNRYDYRTWALSVDGVDAAYVYPLRRGLGTVDIAITSNNDVPSDETIGRCQAYIDDVRPVTARESKVVKPDVTKVNFNIQVKISGVTFPEIKAAISTALADYFNTLIPGDDLIVSQCEAVVNNLVGVVDRKFTAPITNLKADVRTKIEWFRLGQITVTEMA

SEQ ID NO: 3255 - DNA, 351 bp, Haemophilus influenzae
atggacagagagatcagcccgcttactggggactatacaagtaaacaaatcagtacgcttgccaatgcagcgtatatcagattgaccacaccattaggctcttggtgggcagatgggcgtgtaggctctctgcttcatcttattccgcgcgaagaagatttgtcacgcataggtttaattgcacaacaatatgccgaagaagccttgcaacccttgattgatgatggacgtgcggacgaaattattgtcaatcatacccagccacataacggtgtattgattttagatatatctatccgagataaccggggcgaaacctatcattttaaacacccggtaaaagtcatttaa

SEQ ID NO: 3256 - protein, 116 aa, Haemophilus influenzae
MDREISPLTGDYTSKQISTLANAAYIRLTTPLGSWWADGRVGSLLHLIPREEDLSRIGLIAQQYAEEALQPLIDDGRADEIIVNHTQPHNGVLILDISIRDNRGETYHFKHPVKVI

SEQ ID NO: 3257 - DNA, 636 bp, Haemophilus influenzae
atgagacgattaagccaagccattcaacaaagggcgcaaggtgcggtggacgaaatccgtcaagcctttcgcggtgtgctgcacttggtgaaaagtgcggacaatattcagaaagttcaggcatcaggtcttgccgatgaaaccttgcaagatgtggagtttatgcagcagtttggttttacctctgtgcctccggcaaacacgcaagcagtgattttacccattggcggacaaactacccacggtattgtgattgcgaccgagaacggttctttccgcgtaaaaaatctgcaaggcggcgaagtcgctatttatgatgaaagtggctctagcattgtattaaaaaaagggcggttgattgagattgattgtgatgtattaaagattaacgctgcaacaaaagtggatatatcaagtccactggttgaaaccgatcaggtctttactgcccaagggcaaatcaatggtaatggtggtatggctgtgcaaggtggcagtggtgcaagctttactggtaatgtacagcaaagtggcggtagctttacgaccgacggcgacgtgaaagcaggtataatttcgttaagtaaccataaacatactggcgatagcggaggcaaaaccagtaaacctgaataa

SEQ ID NO: 3258 - protein, 211 aa, Haemophilus influenzae
MRRLSQAIQQRAQGAVDEIRQAFRGVLHLVKSADNIQKVQASGLADETLQDVEFMQQFGFTSVPPANTQAVILPIGGQTTHGIVIATENGSFRVKNLQGGEVAIYDESGSSIVLKKGRLIEIDCDVLKINAATKVDISSPLVETDQVFTAQGQINGNGGMAVQGGSGASFTGNVQQSGGSFTTDGDVKAGIISLSNHKHTGDSGGKTSKPE

SEQ ID NO: 3259 - DNA, 1125 bp, Haemophilus influenzae
atgtcaaataattacccttatgaaaatgatgttacggtggaagtggacggtaaagcccacaatagctggaaaagttatgatattgatagtgactttttaatccctgccgatgcctttaaatttgatttgggcgtgccttcaaacagcactgttttacctgatttttcgggagcagaagtgaaagtgcgtattaatggcaagctggtaatgacaggcatcgtggatacgacacagcatactatgagtaaaactaaccgcacttatagcctcaatgggcgcgaccgtgcgagcatccttgtggattgctctgccccaattaccaatgtgaaaggcttgactgtgttggatgcagtgaaaaagattgttgagccacttggtattaaaaaagtggcattgcgtgcggaaaataatccaactttagacaaagtcgatattgacgtgggcgaaaccgcatggaacgcggcaatgcgttgtgcgaactcggcaggcttgcacttgtggtttgagccaaatggagagctgattgtgggcggtgcggattacagcacgccacctgtggcgaccttgtgttgcatgaaagatggtaagcgaaacaactttgagcagtcggatttaacgtttgatgtatcaaatcggtttagcgaagtcacttttcttgcacaaagccacggcaagcaagggcaagacaataaaaacgatctgaaatgggtttatcacgatcctgaaatgactacctacaagccgaaaaccgtggtggtatctgatgtggataatttggaagccttgcaaaaatgggcgaaaaaatacattgcggacagtatgctggaaggttttacccttactatcgttgtacccgatcacaaaatgcaaggcggcacattacggcaaccagggcaacgtgtgcacgtgatttgcgaggaatatgagattgatgcgatctttttcttaatggggcgacgttttacgctgagccgaaacgctggcacacaaacggaactacgctttaaacaagatggcatctggacaccagatgcttacagtgcaaaagcagaaaaagctcgcaagcgcaaaggcaagaaattaatggcgactaatggacatggcagctgggtggctgcgaattaa

SEQ ID NO: 3260 - protein, 374 aa, Haemophilus influenzae
MSNNYPYENDVTVEVDGKAHNSWKSYDIDSDFLIPADAFKFDLGVPSNSTVLPDFSGAEVKVRINGKLVMTGIVDTTQHTMSKTNRTYSLNGRDRASILVDCSAPITNVKGLTVLDAVKKIVEPLGIKKVALRAENNPTLDKVDIDVGETAWNAAMRCANSAGLHLWFEPNGELIVGGADYSTPPVATLCCMKDGKRNNFEQSDLTFDVSNRFSEVTFLAQSHGKQGQDNKNDLKWVYHDPEMTTYKPKTVVVSDVDNLEALQKWAKKYIADSMLEGFTLTIVVPDHKMQGGTLRQPGQRVHVICEEYEIDAIFFLMGRRFTLSRNAGTQTELRFKQDGIWTPDAYSAKAEKARKRKGKKLMATNGHGSWVAAN

SEQ ID NO: 3261 - DNA, 1338 bp, Haemophilus influenzae
atggctggttggacaatgcctgtgcaacgtgcgagttttcgtggcgtgcgttttgatgtgatttcagtggatgatgatgtctatcgctcgaccattgagcatgcttatcctttcgtcaatggcgcagacgtggaagatttgggattaaatccattaaccgtgcgtatgcaagccgtattttatggaccaggctattacacggactttaagaagtttttaagcgtgttacaaaaatcaggggtggcaacattagtgcatccgattcgtgggcgtttgcaaaatatgatttgcaccggggtgagttttcaccacgaagcggagatgattgattatgtggtgttagatttgacttttattgaatctacgccagctaaaccgatttttgtctttaattattccctattggcaaaaatagatgccttactgactgaattagaaaattttgttgatgatgtgatggcattgtatggcgaatttatggagattgttgcctttgccgcgaatacaaaatcacgtttgttgggtgtttatggcgcattatttggttgttttgagcaagtacgcgggttatttgattttgacaaaactaagtatggtgtgtcgcctgtcgtgacacaagataactttaaagcaaaatctagccgtgctgtacgtgatttggtaacaatgattgattcagggttgcgccaaattgctgcgcgcaaggacttaactacccgagcaaaatttgatgaggtacttcgcacaatacgtcaaattaagcatattcctgctgatttggtaagtggtaagaatattaaatctgccaaagaacaagcggcgttgaaatcattaacgacctcttttagtaaggatgatactgaatctgtacatttaatgatgcagttagcctctagtgttgctttgttgcgtattgccactgaattggtcgaggacgatgatttattgccacaggatattgatgacatcacgactcaagtgcggtcacaaattatggataatttacaattattacgcaaacaagtggacgatgaacatcgtggagaaaagatcagggtattaagcacacctaatacgagcttttatacggctgcgcacaatacggcagagcaattacgcaataaagtgcataagtttactcaacttgcccttacggcaattaatcgtaaaccgcctttaatggtgcgtgaggtgccatttagcgggacggtacaacaaattgcccatgcattttatcaggattacaaacgtgcagatgaattattaagattgaatccgcagatccgttatccaaattttgttgagcgtggagagtggttaaacagctatgtcaaataa

SEQ ID NO: 3262 - protein, 445 aa, Haemophilus influenzae
MAGWTMPVQRASFRGVRFDVISVDDDVYRSTIEHAYPFVNGADVEDLGLNPLTVRMQAVFYGPGYYTDFKKFLSVLQKSGVATLVHPIRGRLQNMICTGVSFHHEAEMIDYVVLDLTFIESTPAKPIFVFNYSLLAKIDALLTELENFVDDVMALYGEFMEIVAFAANTKSRLLGVYGALFGCFEQVRGLFDFDKTKYGVSPVVTQDNFKAKSSRAVRDLVTMIDSGLRQIAARKDLTTRAKFDEVLRTIRQIKHIPADLVSGKNIKSAKEQAALKSLTTSFSKDDTESVHLMMQLASSVALLRIATELVEDDDLLPQDIDDITTQVRSQIMDNLQLLRKQVDDEHRGEKIRVLSTPNTSFYTAAHNTAEQLRNKVHKFTQLALTAINRKPPLMVREVPFSGTVQQIAHAFYQDYKRADELLRLNPQIRYPNFVERGEWLNSYVK

SEQ ID NO: 3263 - DNA, 867 bp, Haemophilus influenzae
atggaagaatttccaaatttaaccaaagccgttgttggtgcgactgacgcattacaaattttcagtgcagggcttgctgggttttctctcgttgatttattaacgggtgggaaaatggggggtggtgctttaggtaaagtgacccaaggcgcagcaacaacatcagcgattgcgaatggtgctggcaatctagggaaaaggaaaaacggtttaaaaattaaaggggtcggtaagttaggcagtattcttagtgttggggggctttttgctagtggtttaataattgctggcgaacaaggtagaacggaagacgcgaaggctgaagaaaaagccgaagccaaaactgcgcaagaaaagcagttagaaaatcaattttatgccaatgcttacggtggcaataaaccgaccacaacccattacgcaccgcaaggtttcggttataacaaaaattcgatatggggaacggcttctcgctcgggcgaagtggctgaaattgcacgtaaaaatgaagttgccgctttacgccttgagcgaggcacactcacgcaagcacaatatgatgagcgcatgcgccaaagtgcggtgaaaattgcggaaattcgcaatcaggggaaaggctatttcggtttatctgttgcagctaatgacaccgactccgctttaagtcgcacactgggagatttatctcgcttggctaactatcaagcggattttcagcattttgggcaaaccattagcgacggattaaaaaccgccattgaaagccaaaatttcacgattcaaaacgaaattaaagtggatttagatgggcggattgtggctgaacaaacgtctcagtatcaatatcaagacttaaaacgggggtaa

SEQ ID NO: 3264 - protein, 288 aa, Haemophilus influenzae
MEEFPNLTKAVVGATDALQIFSAGLAGFSLVDLLTGGKMGGGALGKVTQGAATTSAIANGAGNLGKRKNGLKIKGVGKLGSILSVGGLFASGLIIAGEQGRTEDAKAEEKAEAKTAQEKQLENQFYANAYGGNKPTTTHYAPQGFGYNKNSIWGTASRSGEVAEIARKNEVAALRLERGTLTQAQYDERMRQSAVKIAEIRNQGKGYFGLSVAANDTDSALSRTLGDLSRLANYQADFQHFGQTISDGLKTAIESQNFTIQNEIKVDLDGRIVAEQTSQYQYQDLKRG

SEQ ID NO: 3265 - DNA, 369 bp, Haemophilus influenzae
atgaaaacgggaaaaaatgcgattgaagcctttatgagcataattgatcaggtgcttgcaagcgatagaacctatcaaaatctgctaaagcaacttaataatgcaaaagacgataaagaagctcaagctattgcagagcgtatagcgaaatatgtggaaactacaaaacttgctgaagtgatgccagatattcaagcgggtacagctatgtttgctatgcgccgtgataaaaatacggctcaaaatgtagatgagcaatatgccattgctgaaaaaggcaacttcaacaaagaagattttgattttatgcgccaacaaaattcagttcgttttcagattgctaaaaacaaactggaatggcgcaaatga

SEQ ID NO: 3266 - protein, 122 aa, Haemophilus influenzae
MKTGKNAIEAFMSIIDQVLASDRTYQNLLKQLNNAKDDKEAQAIAERIAKYVETTKLAEVMPDIQAGTAMFAMRRDKNTAQNVDEQYAIAEKGNFNKEDFDFMRQQNSVRFQIAKNKLEWRK

SEQ ID NO: 3267 - DNA, 1188 bp, Haemophilus influenzae
atgccttggatagagaccgatgcgatgcaacagcgtgtacttttcttaaaagcgtggctaagccaacgctatactaaaactgaactgtgtcagcagtttgatattagccgtccaacggcagataaatggattaagcgccacgaacagcttggctttgagggcttaaccgagttatctcgtaaacctcatcatagccctaatgccacgccacaatggatttgtgactggcttatcagtgagaaacttaaacgtcctcactggggtgccaaaaagcttttagatagctttactcggcattttccagaggcgaaaaaaccggctgatagcacgggcgatttaattttggcgcatgcagggttagttcagcctcgtaagacgaagcgtcgtatgagtacagacacacaaccttttggcgaatgcatcgcacccaatgccacttggagtgctgacttcaagggacaatttttactcggcaatcagaagttctgctatccgctgacgattacggataatttcagtcgctttttattttgctgtaaggggttgccgaatacaaaatcagcgcccgttattgctgagtttgaacacctttttgagcaatttggtctgccggattcgattcgtaccgataacggctcaccttttgcatcgcaagcattaggtggaatcagcaaactttctaaatggtggattgacttaggtattcgtcctgaacgaattaagccatcacacccagagcaaaacggacgacacgagcgaatgcaccgtagcttaaaagcagcacttcaacctcaaaatagctttgaagctcaacagacattcttcaaccaattcttaccagaatacaacgaagaacgttcacatgaaggcattggtcgtaaaacacctgcagaatgttatgagccgtcaacgcgaatttatacaggtcacattgagccatatgactatggggataatgttgaaatccgcaaagtgaaactcagtggcgaagtcaaatggcaaggaaaaacttattatctcagccaagtgcttgccaatgaacctgtagcgttcgagccttatgccgatagcatttggcatatttattatcgctttcatttactgggcagttttgatgccaaggaaatgaaaattaaatctgccacattgtggcataaacaacctaacgaatgtaaacgatgtccttag

SEQ ID NO: 3268 - protein, 395 aa, Haemophilus influenzae
MPWIETDAMQQRVLFLKAWLSQRYTKTELCQQFDISRPTADKWIKRHEQLGFEGLTELSRKPHHSPNATPQWICDWLISEKLKRPHWGAKKLLDSFTRHFPEAKKPADSTGDLILAHAGLVQPRKTKRRMSTDTQPFGECIAPNATWSADFKGQFLLGNQKFCYPLTITDNFSRFLFCCKGLPNTKSAPVIAEFEHLFEQFGLPDSIRTDNGSPFASQALGGISKLSKWWIDLGIRPERIKPSHPEQNGRHERMHRSLKAALQPQNSFEAQQTFFNQFLPEYNEERSHEGIGRKTPAECYEPSTRIYTGHIEPYDYGDNVEIRKVKLSGEVKWQGKTYYLSQVLANEPVAFEPYADSIWHIYYRFHLLGSFDAKEMKIKSATLWHKQPNECKRCP

SEQ ID NO: 3269 - DNA, 351 bp, Haemophilus influenzae
atgagtcgatttcttccaaattcttttcaaataccaaattcttttgttgatgaatacttagattcactctctggcaaggcaatcaaatgttatttgctcattgcacggaaaactacaggttggagaaaagattcagatcgtatttctacctctcaatttatggctcaatgcggcataaaagatcgaaaaacggcttatgcagcaatagaagaattagagtcggtaaatctagttaatattgaacgtaaacaaggtgaaattaacgagttttcactcaactttttcattgatgaaaataacgattttaaaccagcaccaaaaaatgggactagtaccaaaaaatgggactag

SEQ ID NO: 3270 - protein, 116 aa, Haemophilus influenzae
MSRFLPNSFQIPNSFVDEYLDSLSGKAIKCYLLIARKTTGWRKDSDRISTSQFMAQCGIKDRKTAYAAIEELESVNLVNIERKQGEINEFSLNFFIDENNDFKPAPKNGTSTKKWD

SEQ ID NO: 3271 - DNA, 153 bp, Haemophilus influenzae
atggttcaagcaatgaattgtaaggttggcaatcctgctagaaaacttgtgcttttaaaactagctgataatgccaatgatgatggaatttgttttcctagttatcaatacattgccgataaatgcgaaatgtcaaaacgtagcgcgaattga

SEQ ID NO: 3272 - protein, 50 aa, Haemophilus influenzae
MVQAMNCKVGNPARKLVLLKLADNANDDGICFPSYQYIADKCEMSKRSAN

SEQ ID NO: 3273 - DNA, 297 bp, Haemophilus influenzae
atggcacgcaataaattaacgcgatctgcaagagtgctttcggatcaggttatcgacaaatattacaagcaaaagcaatacgaggtggcggaaggtatggaaaccacgcctagcacactgagtcgttttattagtaatgaagagtttactcagacatttaactttatcgccgcttgtcaatttggtgtttttgatacggatacgcacattgcgattgagaaaagtgaatttgaaatgttactccttgcgtcacaaggctttgataagcggttacgtgagaagtatttgggtaaataa

SEQ ID NO: 3274 - protein, 98 aa, Haemophilus influenzae
MARNKLTRSARVLSDQVIDKYYKQKQYEVAEGMETTPSTLSRFISNEEFTQTFNFIAACQFGVFDTDTHIAIEKSEFEMLLLASQGFDKRLREKYLGK

SEQ ID NO: 3275 - DNA, 240 bp, Haemophilus influenzae
atggaaaatttaaaacatattattgactctttgggtgctgctaaagtggccgatttatgcgggctttctgtccgagctgtttataaatggcgcacatcaaattctttaccacgaactgaatatacaggcgagacaagatattccgagattctatctcaagccttgggaggttctgtctctgcggaagaaattcgacactttagcaaacctattaagtcaggctctgcgattatcgcatga

SEQ ID NO: 3276 - protein, 79 aa, Haemophilus influenzae
MENLKHIIDSLGAAKVADLCGLSVRAVYKWRTSNSLPRTEYTGETRYSEILSQALGGSVSAEEIRHFSKPIKSGSAIIA

SEQ ID NO: 3277 - DNA, 666 bp, Haemophilus influenzae
atgattactgaagaaaaaattaaacagaactttgccgcacggctggacattgcgtgcaaaagaaagaacttgccagaaaaaggcaggggaaaaattattgcagatatgctgaaaattacgccaaaagccgtgagtaaatggttcaatgcggagacattgccaactcaagcaaatatttatgtattggcggattttttggaggtaacaaaagaatggctaacttatggcgataagaatgcttctattgagaaaatcgaaaagcaaatatactaccctttgctaagtccaatccaagcaggactatggactgatattagatcacttgaagggtttgacggttacgagatgatcccaagcactgccatcgcctctgaaaattccttttatctacgaattgaagggaaatctatgctcccccgattcaacgagggcgatctggttttaattgatcctgatattgtgccaacgccaggaaaattcgtggcagcaattaatggcgacaacgaggcgacatttaaacaatacaaagagcttggcacgaaaacaccagaaggcataccgcactttgagcttgttccgcttaatccaatgttcccaacattaagctcgctcaaccaagagatccgcattattggtgtggcaagagaacgcgtagaaatgttatag

SEQ ID NO: 3278 - protein, 221 aa, Haemophilus influenzae
MITEEKIKQNFAARLDIACKRKNLPEKGRGKIIADMLKITPKAVSKWFNAETLPTQANIYVLADFLEVTKEWLTYGDKNASIEKIEKQIYYPLLSPIQAGLWTDIRSLEGFDGYEMIPSTAIASENSFYLRIEGKSMLPRFNEGDLVLIDPDIVPTPGKFVAAINGDNEATFKQYKELGTKTPEGIPHFELVPLNPMFPTLSSLNQEIRIIGVARERVEML

SEQ ID NO: 3279 - DNA, 141 bp, Haemophilus influenzae
atgatgatgcgaatgctattccgttgggcaagtcttgccgccactctgaagaaacgtattgggttgatttcggcgttatttcaacaaaatcaatacttgggcacgggagccctatttcatgagccagtgttgagcctatga

SEQ ID NO: 3280 - protein, 46 aa, Haemophilus influenzae
MMMRMLFRWASLAATLKKRIGLISALFQQNQYLGTGALFHEPVLSL

SEQ ID NO: 3281 - DNA, 102 bp, Haemophilus influenzae
gtggtgaaaagatatgttcagaaaaatcagctctttcgtcaaaagcaagattatgatctatcactaaaattttttgctgttgttcgtcaaaaagcagattaa

SEQ ID NO: 3282 - protein, 33 aa, Haemophilus influenzae
MVKRYVQKNQLFRQKQDYDLSLKFFAVVRQKAD

SEQ ID NO: 3283 - DNA, 114 bp, Haemophilus influenzae
  misc_feature 9, 10, 11, 12, 13: n is any nucleotide
atggaatgnnnnngcttttattcggttgatttggtgctcaattttgtgaaattcttccgtctccaacaaaccaatcatcaggaatggactgataaatatggtcaaattttttga

SEQ ID NO: 3284 - protein, 37 aa, Haemophilus influenzae
  VARIANT 3, 4, 5: Xaa is any amino acid
MEXXXFYSVDLVLNFVKFFRLQQTNHQEWTDKYGQIF

SEQ ID NO: 3285 - DNA, 630 bp, Haemophilus influenzae
atggggataacccgtccctttatttgtcaaacagataaagagaattggtttatcataaaaacattgtctatgatgccaatcagtcaattattagcggaagtcataggctcaacactggctcatgaaatagggctcccgtgcccaagtattgattttgttgaaataacgccgaaatcaacccaatacgtttcttcagagtggcggcaagacttgcccaacggaatagcattcgcatcatcatttgtggtaaatgccaaaattgccaaaaccgttcaagtcaaaaatcctgcatttttatcggaaccagaacaaaaattactctatatgtttgatcgttggattttaaattctgacagaaccgcatcacaagtcggcacaggaaatattaatctgctttttgacgaacaacagcaaaaaattttagtgatagatcataatcttgcttttgacgaaagagctgatttttctgaacatatcttttcaccacagaacagagagtggcgacttgactgggtggataaacaaacttttacagacaaagctattgacacactcaaaaaatttgaccatatttatcagtccattcctgatgattggtttgttggagacggaagaatttcacaaaattga

SEQ ID NO: 3286 - protein, 209 aa, Haemophilus influenzae
MGITRPFICQTDKENWFIIKTLSMMPISQLLAEVIGSTLAHEIGLPCPSIDFVEITPKSTQYVSSEWRQDLPNGIAFASSFVVNAKIAKTVQVKNPAFLSEPEQKLLYMFDRWILNSDRTASQVGTGNINLLFDEQQQKILVIDHNLAFDERADFSEHIFSPQNREWRLDWVDKQTFTDKAIDTLKKFDHIYQSIPDDWFVGDGRISQN

SEQ ID NO: 3287 - DNA, 810 bp, Haemophilus influenzae
  misc_feature 4, 5, 6, 7, 8: n is any nucleotide
atgnnnnntcctctttacacaattgaattaggtataggtataagagtatggaagaaatttgggaattattttattgagccagttaataaaattggttctggcacttttggttatgttgaaaaagtgaatgtttataataaatcacgaacccataaaacaattttcgcaaggaagtattttcgtccaagttataaaccttctgaatctgagttaaatgaacttcaagaacgatttaaacgagaagtaacctatcaagcaaagtgtttccataacaatattgtgccaatttacatgtgtaatttaaattctgcaacgccttggtttgttatggaaattgcagaaagtaatttagacgaaatcctttataacaatgattgtgtggaaggagaaagaaagttatcagaacgttataaactagatgttctgcatatggtcttaaacggcgttgcttaccttcatcagaatggctttttacaccgagatattaagcccctcaacattttgaaatatcctgatggaacttataaaatatctgattttgggttagttaaaaatctcaatagtcaatcgaaccctatcacccaaattgggcaacaaatgggaacgaataaatatatggcacctgaaattgaaaatggcatttattctcctcaatctgatatttatgctctagggattttaatggaagaattagatcttagtgaaaaatatgacgaaataatagaaaaggcaacacagagaaaacctaaaaatagatttcaatctgttaatgaaatgattgaaagaataaatcaaatagaaggaaaataa

SEQ ID NO: 3288 - protein, 269 aa, Haemophilus influenzae
  VARIANT 2, 3: Xaa is any amino acid
MXXPLYTIELGIGIRVWKKFGNYFIEPVNKIGSGTFGYVEKVNVYNKSRTHKTIFARKYFRPSYKPSESELNELQERFKREVTYQAKCFHNNIVPIYMCNLNSATPWFVMEIAESNLDEILYNNDCVEGERKLSERYKLDVLHMVLNGVAYLHQNGFLHRDIKPLNILKYPDGTYKISDFGLVKNLNSQSNPITQIGQQMGTNKYMAPEIENGIYSPQSDIYALGILMEELDLSEKYDEIIEKATQRKPKNRFQSVNEMIERINQIEGK

SEQ ID NO: 3289 - DNA, 705 bp, Haemophilus influenzae
atgttacatttaatttcatcatcaacatattgctttccaaaagaattagtgcgcgaaaaccaagaccacattttagctccgcaaaaataccaaagcggctatcttttcgcagttgccgatggcgtaggtgggtataaaggtggagaaattgcttctcaaattgccattaaaaaccttgagcaagatccgaaaaacgtatttcaagccactttagccgaaattaaacaactgcctgaagaatatcaacgggcttcaaccactctaacctttggctatctcgcgcctgaaggcttatatatcgggcatattggtgactgtcgcttatacatcaagcaaggcaacaaattacgtcaaaaaaccaaagaccacaccacgcaccaacgcttgctagatgaaaagatttacaccaaaaaagaattaaaagagcaaccagggaaaaacatcataaccactgccatttcaacgcaagttgaaatgaagcctgatgaattttttatccctattgacgaactcaaagatgaaaacaacgaagtatttatctacattatgtcagacggtgcacaccatttttgggaacaccgcccacgcttttcagatgccacaatgcaaagtattagcagattttcagcagcattgcaaaaacgtatcgaaaaagcaccaacggatgactattcccttgttgctgtacagtttaaaatagactaa

SEQ ID NO: 3290 - protein, 234 aa, Haemophilus influenzae
MLHLISSSTYCFPKELVRENQDHILAPQKYQSGYLFAVADGVGGYKGGEIASQIAIKNLEQDPKNVFQATLAEIKQLPEEYQRASTTLTFGYLAPEGLYIGHIGDCRLYIKQGNKLRQKTKDHTTHQRLLDEKIYTKKELKEQPGKNIITTAISTQVEMKPDEFFIPIDELKDENNEVFIYIMSDGAHHFWEHRPRFSDATMQSISRFSAALQKRIEKAPTDDYSLVAVQFKID

SEQ ID NO: 3291 - DNA, 654 bp, Haemophilus influenzae
atgtcaaacttaacaattctcaaaacttctattcgttcatacggaaatctttattcattaaacgatcttcataaagcaagtggtaatgcagaaaaacatagaccatctttattcgttcgtttagatacaactcaagatctaatttcagaaattcaaaaagaagttaaaagcacagatctgatctttaaaactactggcggtcgtgggctgcgtggaacctacgcttgtgaagaacttgtaatagcctacgcaatgtggattagtccaaaattccatttgatcgtattacgtgcgttcttagcaatgcaccgcaatcaaccgcaacaactcgcattgccagaacctgaaaagaaattcacccgtgaatttacagagcatgacctgcaacagctcgtctgggcgtggtttgctttattgcgtggcatggaactttgccaagtacttcacccagcattaaaacaaattggttcgcactacgctgcttccgtttatagcatggcttacgaatatcgcagcactctccgtcatgcccataacgtattgacacgcattacagagcaatttgaatgcgagcaaggtaataactggcgcgtattaaaatatcttcgagcctataaccctaaagcaacaggctttcagctagatattctctaa

SEQ ID NO: 3292 - protein, 217 aa, Haemophilus influenzae
MSNLTILKTSIRSYGNLYSLNDLHKASGNAEKHRPSLFVRLDTTQDLISEIQKEVKSTDLIFKTTGGRGLRGTYACEELVIAYAMWISPKFHLIVLRAFLAMHRNQPQQLALPEPEKKFTREFTEHDLQQLVWAWFALLRGMELCQVLHPALKQIGSHYAASVYSMAYEYRSTLRHAHNVLTRITEQFECEQGNNWRVLKYLRAYNPKATGFQLDIL

SEQ ID NO: 3293 - DNA, 786 bp, Haemophilus influenzae
atgccaaaactcgttaagccactcactataacagaaattacaaaagctaagccaaaagaaaaagattattctttgtccgatggctatggtctatttttattcattcgtgttactggctctaagatatggcgatttcaatattataagccaatcaccaaaaaaagaacgattattagcttagggagttaccctgaattatcgcttgcggatgctcgggttaagcgtgatgagtaccggggcctattagcaaaaaatatcgatccgcaagagcataattttattattgagcaggaaaccttacaggaaaaagaaaatctgttttctacacttgctgaaaaatggtttgagttcaaacatcatgaggtaaaagcagggaatttaaaacaagttacttatgatgatattgtcgatcgcgttactcgccatttgctaccgcactttggtcatatggagctaaaaaacatatctgcgccattggcacgaaacaaattaaagtatttagaaaaagaggggaaactagacacattacatcgagttatcgggtatatgagcaaaataatgacccttggcgtgaatattgggttgttgcatagcaatcctattgctaatttatctgaaggttttttaaggcccatagcggaaaataacccgacaatcccaccagaacgattgcctgaattctttgcagcgcttcaatcctctaaaatgtctttagaggttcggtgcgcaatcgaattgctattgttgaccgctactcgtgttggtgcattaacacaaatggagtga

SEQ ID NO: 3294 - protein, 261 aa, Haemophilus influenzae
MPKLVKPLTITEITKAKPKEKDYSLSDGYGLFLFIRVTGSKIWRFQYYKPITKKRTIISLGSYPELSLADARVKRDEYRGLLAKNIDPQEHNFIIEQETLQEKENLFSTLAEKWFEFKHHEVKAGNLKQVTYDDIVDRVTRHLLPHFGHMELKNISAPLARNKLKYLEKEGKLDTLHRVIGYMSKIMTLGVNIGLLHSNPIANLSEGFLRPIAENNPTIPPERLPEFFAALQSSKMSLEVRCAIELLLLTATRVGALTQME

SEQ ID NO: 3295 - DNA, 114 bp, Haemophilus influenzae
gtgaaaagtgcggtagaaaaaggaaataaaaaacggtggaaaaatccaccgctcttttattttaacatatttagattgttgattattcaacaattaatgtacgacatacgttag

SEQ ID NO: 3296 - protein, 37 aa, Haemophilus influenzae
MKSAVEKGNKKRWKNPPLFYFNIFRLLIIQQLMYDIR

SEQ ID NO: 3297 - DNA, 1437 bp, Haemophilus influenzae
atgtctagaagactaagaagaacgaagattgtatgtactatgggcccatcaactgaccgtgataacaatcttgaaaaaattatcgcagcgggcgcaaacgtagttcgtatgaacttctctcacggtacacctgatgaccatatcggacgtgctgaacgtgtacgttctattgcgaaaaaattaggtaaaaccgtggcaatcttaggtgatttacaaggtcctaaaattcgtgtttctacttttaaagacggtaaaattttcttaaacgttggcgataaattcattcttgatgcagagttaccaaaaggcgaaggcactcaagaatccgttggtttagactataaaacgcttcctcaagatgttgtgccgggcgatattcttttattagatgatggccgtgttcaattaaaagtattatcaactgatggtgcaaaagttttcactgaagttactgttggtggtccattatcaaataataaaggtatcaataaattaggtggcggtttatctgcggatgccctaacagaaaaagataaagccgacattattaccgctgcacgtattggtgttgatttcttagccgtttctttccctcgttcaagtgcagatttaaattatgcacgtgaacttgctcaacaagcgggtttaaatgcaaaaatcgttgctaaagttgaacgtgcagaaaccgttgctaatgatgaagccatggacgatattattttagcatccgatgtaattatggttgctcgtggtgacttaggcgtagaaatcggcgatcctgaattagtcggtgtacagaaaaaattaattcgtcgttcacgtcaattaaatcgtgctgtaattacagcgactcaaatgatggaatcaatgattagtaacccaatgccaacgcgtgctgaagtaatggacgttgcaaacgcagtattagatggaactgatgcagttatgctttctgcagaaacagcagcaggtcaatatccttctgaaacagtggcagcaatggctagcgtatgtttaggtgcagaaaaaatgccaagcattaacgtttctcgtcaccgtatggataaagaatttgaaaccattgaagaatctgttgcgatgtctgcaatgtatgcagcaaaccacatgaaaggtgtagcggcaatcgtcactttaagtagcacaggccgtactccattattaatgtcacgcattagctctggcttaccaatctttgctttatctcgtaatcaagaaaccctaaacctttgtgcactataccgcggtgtaacaccaatttatcacggagaagaaagtcgtacagaagccggtgcaaaagcagcacttcaatcattaaaagaaaaaggttatttatctactggcgatttagtgctggtaactcaaggtggtcaaggtgcgacacaaactaacgtatgtcgtacattaattgttgaataa

SEQ ID NO: 3298 - protein, 478 aa, Haemophilus influenzae
MSRRLRRTKIVCTMGPSTDRDNNLEKIIAAGANVVRMNFSHGTPDDHIGRAERVRSIAKKLGKTVAILGDLQGPKIRVSTFKDGKIFLNVGDKFILDAELPKGEGTQESVGLDYKTLPQDVVPGDILLLDDGRVQLKVLSTDGAKVFTEVTVGGPLSNNKGINKLGGGLSADALTEKDKADIITAARIGVDFLAVSFPRSSADLNYARELAQQAGLNAKIVAKVERAETVANDEAMDDIILASDVIMVARGDLGVEIGDPELVGVQKKLIRRSRQLNRAVITATQMMESMISNPMPTRAEVMDVANAVLDGTDAVMLSAETAAGQYPSETVAAMASVCLGAEKMPSINVSRHRMDKEFETIEESVAMSAMYAANHMKGVAAIVTLSSTGRTPLLMSRISSGLPIFALSRNQETLNLCALYRGVTPIYHGEESRTEAGAKAALQSLKEKGYLSTGDLVLVTQGGQGATQTNVCRTLIVE

SEQ ID NO: 3299 - DNA, 144 bp, Haemophilus influenzae
ttgaataatcaacaatctaaatatgttaaaataaaagagcggtggatttttccaccgttttttatttcctttttctaccgcacttttcacttaaacccaatagatatttgcggtatcataggcgacattctagtatcgaaataa

SEQ ID NO: 3300 - protein, 47 aa, Haemophilus influenzae
MNNQQSKYVKIKERWIFPPFFISFFYRTFHLNPIDICGIIGDILVSK

SEQ ID NO: 3301 - DNA, 1305 bp, Haemophilus influenzae
atgctgagcaatcaacattgggatggcattgctgaacgtgtgattgctgacgatttttatacttttcagcatcgtctaatttttacagaaatggaacatctaatgcgtaatcaatcgcctattgatttaattacgctagatcaagccttaagaagccgcggtgtcagcgatgaagtaggtggatttgcctatctagcagagctttctaataatactccgaacgcgattaatattttggcttatgcagatattgtgcgcgagaaagccatattacgagaacttatttcggtagggaatcgcattgctgaaaatagctattctcctaaaggtcaagacatcaaattaattcttgatgaagctgagcgtgaagtatttgcgattgcagaaaaacgaacaacttctagcgaaggcccgcagaatgtgatcaatgtgctagaaagtaccattgaaaaaatcgatattttaagcaaacttgaaaatcattcaggtgtaacgggcattacgacaggtttcactgatcttgataaaaaaacggcaggtttacaaccttctgacttaattatcgttgcggcacgtccgtcaatgggtaaaaccactttcgctatgaacctttgcgaaaatgccgcaatggcaagtgaaaaacccgttttagtatttagtttagaaatgccagcagaacaaattatgatgcgtatgatcgcttcccttgctcgcgttgatcaaactaaaatccgaacaggtcaaaatttagatgaaatcgagtggaacaaaattgccagcgtagtaggaatgttcaagcaaaaaaataatctttttatcgatgattcttcaggtctaacacctaccgatgttcgttcgcgcgcacgccgagtttatcgtgaaaatggtggattaagtatgattatggtggattatttgcaattaatgcgcgcacccgcattttcagataaccgaacactagaaatcgcagaaatttctcgttccctcaaagcactcgccaaagaattacaagtgccagtagttgccctttctcagttaaatcgtactttagaacaacgtgcagacaaacgccctgtaaattcagatttacgtgaatcaggctctattgaacaagatgcagacttgattatgtttatttaccgagacgaagtctataacgataactcggaagataaaggcgttgcagaaattattatcggtaaacagcgtaacggcccaattggtcgagtgcggttaaaatttaatggacaattctcacgcttcgacaatctcgctgaacaacgtgaatatcgagatgattattaa

SEQ ID NO: 3302 - protein, 434 aa, Haemophilus influenzae
MLSNQHWDGIAERVIADDFYTFQHRLIFTEMEHLMRNQSPIDLITLDQALRSRGVSDEVGGFAYLAELSNNTPNAINILAYADIVREKAILRELISVGNRIAENSYSPKGQDIKLILDEAEREVFAIAEKRTTSSEGPQNVINVLESTIEKIDILSKLENHSGVTGITTGFTDLDKKTAGLQPSDLIIVAARPSMGKTTFAMNLCENAAMASEKPVLVFSLEMPAEQIMMRMIASLARVDQTKIRTGQNLDEIEWNKIASVVGMFKQKNNLFIDDSSGLTPTDVRSRARRVYRENGGLSMIMVDYLQLMRAPAFSDNRTLEIAEISRSLKALAKELQVPVVALSQLNRTLEQRADKRPVNSDLRESGSIEQDADLIMFIYRDEVYNDNSEDKGVAEIIIGKQRNGPIGRVRLKFNGQFSRFDNLAEQREYRDDY

SEQ ID NO: 3303 - DNA, 1083 bp, Haemophilus influenzae
atgaacgtaaaaccggcgacagcgaaaattagctcgcacgccttaaaacaaaatttagaaataattaaacaaaaagcaccaaatagcaaaattattgctgtggttaaagcaaacgcttatggtcacggcgttgtattcgttgcttcaaccttagaacaaagcgtcgattgcttcggggtagcgcgtttagaagaggctttagcattacgctcaaacggcattactaaaccgattttattgcttgaaggcttttttaatgaacaagatttgcctattctagccgttaataatattgaaaccgtggtacacaatcacgaacagcttgaggctttaaaacgttcaaatttaccaagtccaattaaagtttggttaaaaatagatacgggaatgcaccgtttaggcgttgctcttgatgaagtggattatttttatcaagaactgaaaaaactccctcaaattcaaccgcacttaggctttgtcagccatttcagccgagccgatgaactagaatcagattacacccaacttcaaatcaatcgttttttatccgccacaaaagataaacaaggtgaacgcactatcgcagcttctggcggcattcttttctggccaaaatctcacttagaatgtatccgcccaggcattattatgtacggcatttctccaactgatactattggcaaagagtttggcttaacgccagtgatgaatttaacctcgtcattaattgccgttcgccatcataaacaaggcgatcctgtaggttacggcggtatttggacaagtccacgagataccaaaattggcgtggtcgcaatgggttatggcgatggttatccgcgcgatgtgccagaaggtacgcctgtttatttaaatggccgtcttgtaccaattgttggacgtgtgtcaatggatatgcttactgttgatttaggcgcagatagccaagatttggtaggcgatgaagtaattttatggggcaaggaattacctattgaaaccgtagctaaattcacaggcattttaagctacgagctaattacaaaattaacacctcgtgttataactgaatacgttgattaa

SEQ ID NO: 3304 - protein, 360 aa, Haemophilus influenzae
MNVKPATAKISSHALKQNLEIIKQKAPNSKIIAVVKANAYGHGVVFVASTLEQSVDCFGVARLEEALALRSNGITKPILLLEGFFNEQDLPILAVNNIETVVHNHEQLEALKRSNLPSPIKVWLKIDTGMHRLGVALDEVDYFYQELKKLPQIQPHLGFVSHFSRADELESDYTQLQINRFLSATKDKQGERTIAASGGILFWPKSHLECIRPGIIMYGISPTDTIGKEFGLTPVMNLTSSLIAVRHHKQGDPVGYGGIWTSPRDTKIGVVAMGYGDGYPRDVPEGTPVYLNGRLVPIVGRVSMDMLTVDLGADSQDLVGDEVILWGKELPIETVAKFTGILSYELITKLTPRVITEYVD

SEQ ID NO: 3305 - DNA, 1650 bp, Haemophilus influenzae
atgaaaaatattaacccaactcacacccaagcgtggaaatctctcgaagcacataaagctgaattatcaaacaccaccatccaagatttatttaaacaagaaaaaaatcgttttgacgattattctttaacattcaataaccaaattcttgtcgatttttccaaaaacaacatcaatcaaacaaccctttcacatcttcgccaacttgctcaagaatgcgcgcttgatagcgcaaaagaagcgatgtttactggcgaaaaaatcaatcgtacagaaaatcgtgccgtactacataccgcactacgcaatcgcactaatacaccagtgcttgttgatggcaaagatgttatgcctgaagtcaatgctgtgttagctaaaatgaaagatttctgtcagcgtattatttctggcgaatggaaaggctatacaggcaaagccattacggatgtagtgaatattggtattggtggctctgacttagggccttatatggtaaccgaagcacttcgcccgtataaaaatcatctaaatatgcactttgtttcaaatgtcgatggtacacacattgcagaaaccttaaaaaaagtcaatccagaaacgactcttttcttagtagcatcgaaaacttttacaactcaagaaaccatgacaaatgcgcaaagtgcgcgtgattggttactgaaagcggcgaaagatgaaagtgcggttgcaaaacattttgcagcattatcaaccaatgctaaagatgtagaaaaatttggcattgataccaataacatgtttgaattttgggattgggttggcggtcgttattctttatggtcagccattggtctttcaattgcgctatcaattggctttgaaaactttgaagcgttattaaatggcgcgcatgaaatggatgaacatttccgctctactccaatcgaacaaaatatcccaaccactttagcattagttggtttatggaataccaattttcttggtgcgcaaacagaagcgatcttaccttatgatcaatatttacatcgcttcgcagcttattttcaacaaggtaatatggaatcaaatggtaaatatgtggatcgtgatggcaatgtcattaacaattatcaaactggccctatcatttggggagaacctggtacaaacggacaacacgcgttctatcaattaattcatcaaggcactactttaattccttgtgattttatcgcacccgctcaaagccataacccattggcagatcatcacaataaattgctttcaaacttctttgcacaaacagaagcattagcattcggaaaaacaaaagaggaagtcgaggctgaatttgtaaaagcggggaaatctttggatgatgtgaaaaatattgttccatttaaagtatttacgggtaataagccaactaattccattctcgttcaaaaaatcacgccatttaccttgggtgcattaattgcgatgtatgaacacaaaatcttcgtacaaggtgtgatttttaatatctttagcttcgatcaatggggtgtcgaactaggcaaacaacttgcaaacagaattcttcctgaattaacagattctgaaaaagtagcaagtcatgacagttcaacaaatggattaattaatcaatttaaagcatggcgttaa

SEQ ID NO: 3306 - protein, 549 aa, Haemophilus influenzae
MKNINPTHTQAWKSLEAHKAELSNTTIQDLFKQEKNRFDDYSLTFNNQILVDFSKNNINQTTLSHLRQLAQECALDSAKEAMFTGEKINRTENRAVLHTALRNRTNTPVLVDGKDVMPEVNAVLAKMKDFCQRIISGEWKGYTGKAITDVVNIGIGGSDLGPYMVTEALRPYKNHLNMHFVSNVDGTHIAETLKKVNPETTLFLVASKTFTTQETMTNAQSARDWLLKAAKDESAVAKHFAALSTNAKDVEKFGIDTNNMFEFWDWVGGRYSLWSAIGLSIALSIGFENFEALLNGAHEMDEHFRSTPIEQNIPTTLALVGLWNTNFLGAQTEAILPYDQYLHRFAAYFQQGNMESNGKYVDRDGNVINNYQTGPIIWGEPGTNGQHAFYQLIHQGTTLIPCDFIAPAQSHNPLADHHNKLLSNFFAQTEALAFGKTKEEVEAEFVKAGKSLDDVKNIVPFKVFTGNKPTNSILVQKITPFTLGALIAMYEHKIFVQGVIFNIFSFDQWGVELGKQLANRILPELTDSEKVASHDSSTNGLINQFKAWR

SEQ ID NO: 3307 - DNA, 213 bp, Haemophilus influenzae
  misc_feature 4, 5, 6, 7, 8: n is any nucleotide
atgnnnnnagcagtagtggtgcaaattggcggtgcaatagctggaagtaaaatcgaagaaaaaatgagtcaagtaaacggtgctgaacttgtaattaagaaagatgatggtcaagagatcgttgttgttcaaaaggctgacagcagttttgtagctggtcgccgagttcgtattgttggtggcggctcaagcttaaatgtttctgtgctataa

SEQ ID NO: 3308 - protein, 70 aa, Haemophilus influenzae
  VARIANT 2, 3: Xaa is any amino acid
MXXAVVVQIGGAIAGSKIEEKMSQVNGAELVIKKDDGQEIVVVQKADSSFVAGRRVRIVGGGSSLNVSVL

SEQ ID NO: 3309 - DNA, 252 bp, Haemophilus influenzae
ttgagtgctttttctgcttttcaaaaggaggaggggacttataaaggtcaaattatttttagtcaaatggaaggcaaaaatctaaaattaactgttcgtaaaaatgattgttctggtaaccagcagaaaggagaggaagttgttattgtgcataagtatgattcaactttagttgttggtgcttgtgttttagtatctgacaatggtaatactaaagacatttcaactttttctccaagaaacccactttaa

SEQ ID NO: 3310 - protein, 83 aa, Haemophilus influenzae
MSAFSAFQKEEGTYKGQIIFSQMEGKNLKLTVRKNDCSGNQQKGEEVVIVHKYDSTLVVGACVLVSDNGNTKDISTFSPRNPL

SEQ ID NO: 3311 - DNA, 570 bp, Haemophilus influenzae
atgacaaatttacaggaaaatttaaccgcactttcagcagatttagcaatatttgaaagaaaaattcagcatttagccaaagaaatgacaatagatctgtctcactatgaaattgatcatcttgcattacgggtaaatagtgagcaaagtgctaaaaattggctgatacttttattacagtgcggtagaattttatctgataatattgttaatggtcgtaagatttatcttattgaattagaaaaaccagttaaatttgccaatcaatttgtggatattattgaacttccacttcctaaaaataaaaaatatccaattgagggatgggaacatattgagattgtaatgccatttttaccgaaagaatcgataaatgaatggattaaccgtgttaatatgtattttttatgggacaaattaactcaattaaccattaaagtgagcgagcctaaagtggatggggaaagattaccaaatccatctattgcagtaagttttacggataaaacagtaaatcatacttgcattaaggttcatccttattctataaaaaaaatacttgaggtttag

SEQ ID NO: 3312 - protein, 189 aa, Haemophilus influenzae
MTNLQENLTALSADLAIFERKIQHLAKEMTIDLSHYEIDHLALRVNSEQSAKNWLILLLQCGRILSDNIVNGRKIYLIELEKPVKFANQFVDIIELPLPKNKKYPIEGWEHIEIVMPFLPKESINEWINRVNMYFLWDKLTQLTIKVSEPKVDGERLPNPSIAVSFTDKTVNHTCIKVHPYSIKKILEV

SEQ ID NO: 3313 - DNA, 1734 bp, Haemophilus influenzae
gtgaatattcaatctattctatccgataaaattaaacaagcgatgattcttgcaggtgctgatcaatcttgcgatgcgcttattcgtcaatcaggaaaaccacaatttggcgattatcaagccaatggcattatggctgcggcaaaaaaattaggtttaaatccacgagaatttgctcaaaaagttttagataatgctcaactatctgatattgcagaaaaattagaaatcgcaggcccaggttttatcaatattttcttaaatccaacttggctaacaactgaaatttcagctgcactttcccacaaaaatttaggtattcaagctaccaataaacaaacagttgtgattgattattcatcgccaaacgtagcaaaagaaatgcacgtaggtcatttacgctctacgataatcggcgatgctgtagccagaacccttgagtttttaggtcacaatgtcatccgcgctaaccacgtaggcgactggggaacgcaattcggaatgcttattgcttatcttgaaaaaatgcaacatgaacacgccagtgaaatggaattacaagatcttgaagccttttatcgcgaagccaaaaaacattacgatgaagatgaaatattcgcagaaaaagcgcgtaattacgtcgtaaaattacaaagtggagatgaatattgtcgaacgatgtggaaacgtttagtcgatatcactatgcaacaaaatcagcacaactataatcgcttaaacgtgactttaaccgaaaaagatgtaatgggcgaaagtctttataatcctatgttaccaagcatcgtagaagatcttaaaaaacaaggtttagctgtggaaaatgatggtgcattggttgtttatttagatgaatttaaaaataaagatggcgacccaatgggtgtaatcgttcaaaaaaaagacggcggtttcctttatactacaacagatattgctgcagcaaaatatcgttatgaaacattaaaagctaatcgcgcccttgttttttcagatactcgccaaagccaacatatgcaacaagcttggttaattactcgtaaagcaggttatgtaccagatggtttctcgttagagcataaaaactttgggatgatgcttggtaaagatggcaagccatttaaaacccgtactggtggcacagtgaaattggccgatctattagatgaagccattgaacgtgccactgtattaattaatgaaaaaaataccaatttatctaatgatgaaaaagaagctgtgattgaagccgttggtattggtgcggtgaaatatgcagatctctccaaaaaccgtactactgattacgtttttgattgggataatatgttaagtttcgaaggtaacacggcaccttatatgcaatatgcctacacccgtattcgttcgatctttaataaaacagatataaattcaaccgcacttttggctgcacctttaactattaaagatgataaagaaagaacgcttgctattaaacttctacaatttgaagaagccgtgcaaactgtcggaaaagaaggcacgccgcacgtgctttgtgcttatttatatgaacttgctggcatcttctcgtcattctacgaacattgcccaattttaaatgctgaagatgagtccgtaaaattaagccgcctgaaattggcattattaacagaaaaaaccttaaaacagggtttaacgttactcggtattaaaaccgtagaaaaaatgtaa

SEQ ID NO: 3314 - protein, 577 aa, Haemophilus influenzae
MNIQSILSDKIKQAMILAGADQSCDALIRQSGKPQFGDYQANGIMAAAKKLGLNPREFAQKVLDNAQLSDIAEKLEIAGPGFINIFLNPTWLTTEISAALSHKNLGIQATNKQTVVIDYSSPNVAKEMHVGHLRSTIIGDAVARTLEFLGHNVIRANHVGDWGTQFGMLIAYLEKMQHEHASEMELQDLEAFYREAKKHYDEDEIFAEKARNYVVKLQSGDEYCRTMWKRLVDITMQQNQHNYNRLNVTLTEKDVMGESLYNPMLPSIVEDLKKQGLAVENDGALVVYLDEFKNKDGDPMGVIVQKKDGGFLYTTTDIAAAKYRYETLKANRALVFSDTRQSQHMQQAWLITRKAGYVPDGFSLEHKNFGMMLGKDGKPFKTRTGGTVKLADLLDEAIERATVLINEKNTNLSNDEKEAVIEAVGIGAVKYADLSKNRTTDYVFDWDNMLSFEGNTAPYMQYAYTRIRSIFNKTDINSTALLAAPLTIKDDKERTLAIKLLQFEEAVQTVGKEGTPHVLCAYLYELAGIFSSFYEHCPILNAEDESVKLSRLKLALLTEKTLKQGLTLLGIKTVEKM

SEQ ID NO: 3315 - DNA, 492 bp, Haemophilus influenzae
atgcgtagaattttatctgttttactcgaaaatgagtctggtgctttatcgcgtgttgttggtttattctcccaacgtgcctttaatattgaaagtttgacggttgcaccaacggatgatccaacgctttctcgaatgaccattgaagctgtgggcgatgctcaggcattggagcaaatcgaaaaacaacttcataaattagtggatgtgtttaaagtggttaatttaagtgagcaggaacatatagaacgagaaattgttttagcgaaagtaagagcagtaggttcatctcgcgatgaaattaaacgattagcagatattttccgcggtcaaattgtagatgtcacaccaaagtcttacacaattcaattaagcggtacaaatgataaagttgatgcgtttatttctgcattgaaagaagaaactacattgttagaaattgttcgttctggattgattagtgtgtctcgtggagaaaagaatattctttaa

SEQ ID NO: 3316 - protein, 163 aa, Haemophilus influenzae
MRRILSVLLENESGALSRVVGLFSQRAFNIESLTVAPTDDPTLSRMTIEAVGDAQALEQIEKQLHKLVDVFKVVNLSEQEHIEREIVLAKVRAVGSSRDEIKRLADIFRGQIVDVTPKSYTIQLSGTNDKVDAFISALKEETTLLEIVRSGLISVSRGEKNIL

SEQ ID NO: 3317 - DNA, 1722 bp, Haemophilus influenzae
atgaagaagttatctggcgcagagatggtggttcaatctttacgtgatgaaggcgtagagtatgtatttggttatcccggaggcgcggtattagatatttatgatgcaattcatacgctgggtggtattgaacatattttagttcgccacgaacaagccgcggtgcatatggcggatggttacgcacgttcaacgggtaaagttggatgtgtgctagtgacttcggggcctggtgcaacaaatgctatcactggcattttaacggcttataccgattctgtgcctatggttatcatttcgggtcaggttatgagcaatttaattggcagtgatgctttccaagaatgtgatatgctgggtatttctcgtcccgttgtgaagcatagctttattgtcaaaaaggcggaagatattccatctactttgaaaaaagccttttatattgcatctacgggtcgtccaggccctgttgttgtggatattccaaaagacactgtaaatcctaattttaaatatccttatgaataccctgaatctgtcgagttacgttcttataatcccacagtaaatggacacaaaggtcaaattaaaaaagcattaaaagcacttttagtagcgaaaaaaccaatactttttgtcggtggtggcgcaatcactgctgaatgtagtaagcagttaattcagtttgcacaacgtttaaatttacccgtgacttcctcattaatgggattgggtgcttatccaagtacggataaacaattcttaggtatgttgggtatgcatggtactttagaagcgaatacggcaatgcacgaaagtgatcttattttggggattggcgttcgttttgatgatcgtacgacaaataatttagaaaaatattgcccaaatgcaaaagtgattcatattgatattgatccaacctcaatttctaaaaatgtgccagtagcgattccaattgtcggaaatgcgaaaaatgtattggaagaatttttgggtttattgaatgaagagggattaaaatctcaaacggatcttgaaagttggtggcaagaaatcaaccaatggaaagcaaaaaaatgtttggaatttgaccgcacttctggcgtgattaaaccgcaacaagtcgtggaagcggtatatcgcctcacgaaaggacaagcttatgtggcttctgatgtaggtcagcaccaaatgtttgctgcgttacattatccattcgatgaaccgcgtcattggattaattctggtggtgcaggcacaatgggttttggttttcctgcggcacttggtgtgaaattagctcatcctgaaggaactgttgtttgcgttactggcgatggtagtattcaaatgaatattcaagagctttctaccgcaacgcagtatggtattcctgttgtcattatttgtttgaataatcatttcttgggaatggtaaaacaatggcaagatttgatttattctggtcgccattcgcaaacctatatgaattccttgcctgattttgcgaaattggcagaatcttacggtcacgtaggaataaaaattgctacccccgatgaacttgaaagcaaattgcaagaagcattcagtattaaaaataaattagtctttgtagatattaatgtagatgaatctgaacacgtttatccaatgcaaattcgtggtggtgcaatgaatgaaatgattttaagtaaacctcaagaggagacaaactaa

SEQ ID NO: 3318 - protein, 573 aa, Haemophilus influenzae
MKKLSGAEMVVQSLRDEGVEYVFGYPGGAVLDIYDAIHTLGGIEHILVRHEQAAVHMADGYARSTGKVGCVLVTSGPGATNAITGILTAYTDSVPMVIISGQVMSNLIGSDAFQECDMLGISRPVVKHSFIVKKAEDIPSTLKKAFYIASTGRPGPVVVDIPKDTVNPNFKYPYEYPESVELRSYNPTVNGHKGQIKKALKALLVAKKPILFVGGGAITAECSKQLIQFAQRLNLPVTSSLMGLGAYPSTDKQFLGMLGMHGTLEANTAMHESDLILGIGVRFDDRTTNNLEKYCPNAKVIHIDIDPTSISKNVPVAIPIVGNAKNVLEEFLGLLNEEGLKSQTDLESWWQEINQWKAKKCLEFDRTSGVIKPQQVVEAVYRLTKGQAYVASDVGQHQMFAALHYPFDEPRHWINSGGAGTMGFGFPAALGVKLAHPEGTVVCVTGDGSIQMNIQELSTATQYGIPVVIICLNNHFLGMVKQWQDLIYSGRHSQTYMNSLPDFAKLAESYGHVGIKIATPDELESKLQEAFSIKNKLVFVDINVDESEHVYPMQIRGGAMNEMILSKPQEETN

SEQ ID NO: 3319 - DNA, 1521 bp, Haemophilus influenzae
atggaacttattgatttttcatcatctgtttggtcaatcgtccctgctttgttggcgataattttggcgatagcaactcgccgtgttttggtttcccttagtgcggggattattattggatcattaatgttaagcgattggcaaatcggcagcgcatttaattatttggtaaaaaatgtggtttctttggtttatgccgatggtgaaatcaattcaaatatgaacattgttttgttcttattattgcttggtgttttaaccgcacttttaaccgtatcaggtagtaatcgtgcctttgctgaatgggcgcaaagccgtattaaagatcgtcgtggtgctaaattattagcggcatcattggtttttgttacttttattgacgattatttccatagtctcgctgtaggtgcaattgctcgtcctgtgacagatcgttttaaagtttctcgtgcgaaacttgcttatattttagattcaacggcagcaccgatgtgtgtaatgatgccagtttccagttggggtgcatatattattactttaataggtggtttattagcgacttattcgatcacggagtacacaccaattggtgcattcgtagcaatgagttcaatgaacttctatgcaattttttccattattatggtgttttttgtggcatatttttcttttgatattgcttcaatggtgcgtcacgaaaaattagctttggaaaatactgaagatcagttggaagaagaaacgggtacaaaaggtcaggtgcgtaatcttgtattacctattttagttttaattatcgctacaatgtcaatgatgatttacacgggtgcagaggcattggctgcggatggcaaagtgtttagtgttttaggtgcatttgaaaacaccgtagtaggaacatctttggttgtaggtggattctgttcaattattatttctactttattaattattcttgatcgtcaagtgagtgttcccgaatatgcacgttcttggatcgtgggaattaaatcaatgtcaggcgcaatcgcaattttattctttgcttggacaattaataaaatcgtaggcgatatgcaaacaggtaaatatctatcttctcttgtgtctggtaatattccaatgcaatttttaccagtgatcttattcattcttggttctgcaatggcattttcaacaggtacgagctggggaacattcggtattatgttgccaattgccgcagcaatggcagcgaatgccgcaccagaattattgcttccttgtttatctgcagtaatggcaggggctgtatgtggcgatcattgctcgccagtgtcggatacaacaattttgtcttcaacgggcgcgaaatgtaatcatattgatcacgttactactcagcttccttatgctgccacagttgcaacagcgacttctattggttacattgtggtagggtttacttattcaggtttagctggttttgcagcaacggcagtttcattgattgtcattgtatttgcagttaaaaaacgctaa

SEQ ID NO: 3320 - protein, 506 aa, Haemophilus influenzae
MELIDFSSSVWSIVPALLAIILAIATRRVLVSLSAGIIIGSLMLSDWQIGSAFNYLVKNVVSLVYADGEINSNMNIVLFLLLLGVLTALLTVSGSNRAFAEWAQSRIKDRRGAKLLAASLVFVTFIDDYFHSLAVGAIARPVTDRFKVSRAKLAYILDSTAAPMCVMMPVSSWGAYIITLIGGLLATYSITEYTPIGAFVAMSSMNFYAIFSIIMVFFVAYFSFDIASMVRHEKLALENTEDQLEEETGTKGQVRNLVLPILVLIIATMSMMIYTGAEALAADGKVFSVLGAFENTVVGTSLVVGGFCSIIISTLLIILDRQVSVPEYARSWIVGIKSMSGAIAILFFAWTINKIVGDMQTGKYLSSLVSGNIPMQFLPVILFILGSAMAFSTGTSWGTFGIMLPIAAAMAANAAPELLLPCLSAVMAGAVCGDHCSPVSDTTILSSTGAKCNHIDHVTTQLPYAATVATATSIGYIVVGFTYSGLAGFAATAVSLIVIVFAVKKR

SEQ ID NO: 3321 - DNA, 405 bp, Haemophilus influenzae
atgaacgaattagtaagaggtttaacaaatcttcgtagtttacgtgcagctgtacgtgaattaacgttagaacaagcagaaaatgccctagaaaaattacaaacagctatcgaagaaaaacgtgctaatgaagcagaattaattaaagcagagacagagcgaaaagagcgtttagctaaatataaagaattaatggaaaaagaaggtattacacctgaagaattacacgaaatttttggcacaaaaactgtatcaattcgagcaaaacgtgctccacgccctgcaaaatatgcgtttattgatgaaaatggcgagcataaaacttggacgggtcaaggtcgcacaccacgcccaattcaaaatgcgttgaacaaaggtaaatcattatctgatttcgaaatttaa

SEQ ID NO: 3322 - protein, 134 aa, Haemophilus influenzae
MNELVRGLTNLRSLRAAVRELTLEQAENALEKLQTAIEEKRANEAELIKAETERKERLAKYKELMEKEGITPEELHEIFGTKTVSIRAKRAPRPAKYAFIDENGEHKTWTGQGRTPRPIQNALNKGKSLSDFEI

SEQ ID NO: 3323 - DNA, 897 bp, Haemophilus influenzae
ttgaaactagaacctattttatgggttctatttttttatctaaacatagcacacaacattatgatcgaaaaaaaaatattactcactgattgccctgatgataaaggcttaatcgcaaaaataactaatatttgttacaaacatcaactaaatattcttcataataatgaatttgtagattttgaaaccaaacatttctttatgcgcacagaattggaaggtatttttaacgaagctactttattagaagatctaaaatatagcttacccgaagaaacgaattgtcgattaattggcacccaacgtaagcgaattgtaattttagtcaccaaagaagctcactgcctcggcgatattttaatgaaaaattattatggtgcacttgatgtagaaattgcagccgtaatcggcaatcacgataatttacgtgaacttgttgaacgttttaatattccatttcatttagttagccacgaaaacttaacccgtgtagaacacgacaaattactggcagaaaaaattgatgaatatacgccagattatattgttctcgctaaatatatgcgtgtgctaaaccctgaatttgtcgcgcgttatccaaatcgagtgattaatatccatcattcattcttgcctgcttttattggagccaagccttatcaacaagcctatgaacgcggtgtaaaaattattggcgcaacggcacattttattaataacgaattagatcaaggcccaatcattatgcaaaatgtgattaatgtggatcatacttataatgcagaagcgatgatgcgtgctggccgtgatgtggaaaaaaccgtgttaagtcgcgcccttgatctcgctttacacgatagaatttttgtttataaaaataaaacggtggtgttgtaa

SEQ ID NO: 3324 - protein, 298 aa, Haemophilus influenzae
MKLEPILWVLFFYLNIAHNIMIEKKILLTDCPDDKGLIAKITNICYKHQLNILHNNEFVDFETKHFFMRTELEGIFNEATLLEDLKYSLPEETNCRLIGTQRKRIVILVTKEAHCLGDILMKNYYGALDVEIAAVIGNHDNLRELVERFNIPFHLVSHENLTRVEHDKLLAEKIDEYTPDYIVLAKYMRVLNPEFVARYPNRVINIHHSFLPAFIGAKPYQQAYERGVKIIGATAHFINNELDQGPIIMQNVINVDHTYNAEAMMRAGRDVEKTVLSRALDLALHDRIFVYKNKTVVL

SEQ ID NO: 3325 - DNA, 1299 bp, Haemophilus influenzae
atggaaaaaattactcttgcaccaataagtgcggttgaaggaacaattaatttaccaggttctaaaagtttatcgaatcgcgcattacttttagccgccttagctaaaggcacaacaaaagtaaccaatttattagatagcgatgatattcgacatatgcttaacgcactgaaagcattgggcgtacgctatcaactgtctgatgataaaactatttgtgaaatagagggattaggcggagcattcaatatacagaataatctttcactctttcttggcaatgctgggactgcaatgcgtccattaaccgcagcactttgcttaaaaggaaaaaccgaaagcgaaatcatcttaacgggtgaacctcgtatgaaagagcggccaattctccatttagtcgatgctttacgccaagcgggtgcagatattcgctacttagagaatgagggttaccctccgctcgcaattcgcaacaaagggataaaaggtggaaaagtcaaaattgatggttcaatttcatctcaatttttgaccgcacttttaatgtctgcaccacttgcagaaaatgacacagaaatagaaattatcggtgaactagtctctaaaccctatattgacattacccttgcaatgatgcgagattttggtgttaagattgaaaatcatcactaccaaaaattctacattaaaggcaatcaatcctatatttcgcctaataaatacttggtagaaggcgatgcatcatcagcctcttactttcttgcagctggcgccattaaaggaaaagtgaaagtaacaggcattggcaaaaattcaattcaaggcgatcgtttatttgctgatgtattagaaaaaatgggggcaaaaatcacttggggagaggattttatccaagccgaacaagctgaattaaatagtattgatatggatatgaaccacattccagatgccgcaatgacgattgcgaccaccgcacttttttccaacggcgaaaccgtcattcgcaatatttataactggcgtgtgaaagaaacagatcgattaacagcaatggcaaccgaactacgtaaaatcggtgcagaagtcgaagaaggtgaagattttattcatattcaaccgcttccactcaatcaatttaaacacgccaatattgagacctataacgatcaccgtatagcaatgtgtttttctctaatcgcactatcaaacacacctgtgacgattttagatcccaaatgtactgccaaaacctttcctacattctttagtgaatttgagaaaatttgcttaagagattaa

SEQ ID NO: 3326 - protein, 432 aa, Haemophilus influenzae
MEKITLAPISAVEGTINLPGSKSLSNRALLLAALAKGTTKVTNLLDSDDIRHMLNALKALGVRYQLSDDKTICEIEGLGGAFNIQNNLSLFLGNAGTAMRPLTAALCLKGKTESEIILTGEPRMKERPILHLVDALRQAGADIRYLENEGYPPLAIRNKGIKGGKVKIDGSISSQFLTALLMSAPLAENDTEIEIIGELVSKPYIDITLAMMRDFGVKIENHHYQKFYIKGNQSYISPNKYLVEGDASSASYFLAAGAIKGKVKVTGIGKNSIQGDRLFADVLEKMGAKITWGEDFIQAEQAELNSIDMDMNHIPDAAMTIATTALFSNGETVIRNIYNWRVKETDRLTAMATELRKIGAEVEEGEDFIHIQPLPLNQFKHANIETYNDHRIAMCFSLIALSNTPVTILDPKCTAKTFPTFFSEFEKICLRD

SEQ ID NO: 3327 - DNA, 1341 bp, Haemophilus influenzae
atgtctaacctcaattttgattttgctgaaaatgattttcgcccactggcggccaagatgcgtccaacgagtctagaacaatattttgggcaaagccatttaattggcgagggcaagccactgcgaaaagcgattcaagctgggcatattcattctatgattttctgggggccaccaggtacaggaaaaacaacgcttgcagaaattattgcgcaacgtattaatgcagaagttgagcgaatttctgcggtgacgagtggtatcaaagaaattcgtgaagccattgagcgtgcaaaacaaaatcgtcttgcggatcgtaaaactatcttatttgtggatgaagtccatcgttttaataaaagccagcaagatgcatttttaccgcacattgaagacggaaccgttatttttattggggcgacaacagaaaatccctcttttgagctaaataatgcgttgctttctcgtgccagagtatatgtgctgaaatcactcacaacggctgaaattgaacaagttttgcagcaagctgtagaagatcctgaacgaggattgggtaaagagcggttaattttagaagagaatttactgcaagtgcttgccgaatatgttaatggggatgcgcgattagccttgaattgcctcgaattaatggtggatatggcagatgaaacggaaaatggaaagaaaattgaccgcactttattaaaagaagtcttaggtgaacgtcaagcgagatttgataaacaaggtgatcgtttctatgatttaatttctgcgctacataaatctgttcgcggttctgctccagatgctgcgctgtattggtatgcaagaattttaacagcgggtggagaccctttatatgttgcgcgccgattacttgccattgcttcagaagatgtgggaaatgcagatcctcgtgctatgcaagtcgcattggctgcttgggattgctttactcgagtgggggcttatgaaggggagcgagccatcgcccaagccattatttatcttgcagtagccccaaaaagtaatgcagtttataccgcatttaacactgcgaaacagcaagcgaaagatttacctgattacgatgttccaccacatttacgcaatgcgccgactaatttaatgaaagagctcggatatggcactgaatatcgttatgctcacgatgaacctaacgcttatgcggcaggcgaaaattatttcccacctgaattaaaagacactcaatattattttccgacaaatagaggtatggaaattcagattaaggaaaaactagaacggttacgtgagcaagataaaagtgcggtgaaaaaacggtataaataa

SEQ ID NO: 3328 - protein, 446 aa, Haemophilus influenzae
MSNLNFDFAENDFRPLAAKMRPTSLEQYFGQSHLIGEGKPLRKAIQAGHIHSMIFWGPPGTGKTTLAEIIAQRINAEVERISAVTSGIKEIREAIERAKQNRLADRKTILFVDEVHRFNKSQQDAFLPHIEDGTVIFIGATTENPSFELNNALLSRARVYVLKSLTTAEIEQVLQQAVEDPERGLGKERLILEENLLQVLAEYVNGDARLALNCLELMVDMADETENGKKIDRTLLKEVLGERQARFDKQGDRFYDLISALHKSVRGSAPDAALYWYARILTAGGDPLYVARRLLAIASEDVGNADPRAMQVALAAWDCFTRVGAYEGERAIAQAIIYLAVAPKSNAVYTAFNTAKQQAKDLPDYDVPPHLRNAPTNLMKELGYGTEYRYAHDEPNAYAAGENYFPPELKDTQYYFPTNRGMEIQIKEKLERLREQDKSAVKKRYK

SEQ ID NO: 3329 - DNA, 618 bp, Haemophilus influenzae
atgaaaaaaacaaccttaaaatttgccgcacttaccttacttggtttgagtaatttggcattggctgatgcggcaagtgaattacaaatgcgtttagctaaagtcgatgtattaagtgcagaatttgtgcaaacagtgacttctggaagtggcaaaaatgttcaacaaggaagtggcaaacttcaaattaaacgcccaaatttattccgtatggagactaaaacccctcaagaaacccagattatttctgatggtaaaaccttatggttctacgatccatttgtgcaacaagtgaccgcacaatgggtgaaagatgccgtgaataacacaccattcgtattgcttacaagtaacgataaaagccattgggatcaatattcggtcatgcaacaagtggatactttcgtattgaaacataaatcttcaaaaagtaatatcaagcaatttgatattcgcgtcgatgccaatggcgtattaagaaatttcagtacgaccgagaaagatggacaaaccaatctttatgttttacgtaatattactaatcaaaccttgtctgatagcttgttccaattcaagccagaaaaaggcattgaagttgatgatcaacgcaaaaaataa

SEQ ID NO: 3330 - protein, 205 aa, Haemophilus influenzae
MKKTTLKFAALTLLGLSNLALADAASELQMRLAKVDVLSAEFVQTVTSGSGKNVQQGSGKLQIKRPNLFRMETKTPQETQIISDGKTLWFYDPFVQQVTAQWVKDAVNNTPFVLLTSNDKSHWDQYSVMQQVDTFVLKHKSSKSNIKQFDIRVDANGVLRNFSTTEKDGQTNLYVLRNITNQTLSDSLFQFKPEKGIEVDDQRKK

SEQ ID NO: 3331 - DNA, 2730 bp, Haemophilus influenzae
atgattaaacaaattacagaacgatttacgccaagacagtatttagcggaatttttgctgggattaaccgcactttttggactttatttgattgttgcttggtcaagttatacgccccttgataattcttgggcaacagccagtgcgtatggaaacacaattaataaagtaggttcatttggggcgtggataatcgatcttttttttgtttttttaggttatgttgcccatattattcctttcaccgcttttctcgtgcctatttatttattgaaaacaaaagcagttaaacagctttcctgtactcgaattattctacgtagttttggctttactatgctgattattgggctttgtgtagtgagtatgttgcttttatcaagtaatactttttatttgagtggcggcgtattgggcggatcgcttgttgtaaattggttttatcctgtattaggtaaatttggttcaattttaattggttttgtgcttgctttaattggttttattttttgttctggcgcatcattaattcgattaattgttgcattttatcattggctaacaatgaaaaatgagcaatcagaaaatgctgagcaagaaaaatcaacggaagaattagagcaaattgtgattgtaaaatcagatcgttcagaaacagaaaatctagatcaaaatcatctcaatgtagaacaaaatagtgagattgaaactcaaaaatcatctttagaggcagaagaaagctcagttgagcaaccttcgcatttaattaatattcatggtttaaatccagaggtttctataaaatcagaatatgaactcgcgaacgaagagaatgaaaaaccgcaattttcttttgggtttgattctgaaagcttgcctagtgtgaatttatcgagtgattcagatgaacaaagggtaagcaaaaatgattttgtcgcagtttggaataagcctgtaaaaacagttgttcaagaagatttagcaattaatcaaagtgcggatgattttactcaagtttctttgctaacaaaagatgaaatgccaacagttttattaagacccagtcatgaatctttgaatactgaaatggtagatttagaaaaagatggagtgaaatttaacgtatccttagaggatgatatggaagccgttcaattagacaaaaatcaagagcctaattataaaggttatagcggtagcttgattcatcctgcatttcaacagcaaacaacaaaacgtgaaaaaccgagtacaccattacctagtttggatttgcttttaaaatatccgccaaatgaacaacgcattacaccagatgaaataatggaaacctcacagcgtattgaacagcaattacgcaattttaatgtaaaagccagcgtaaaagatgtgcttgttggccctgttgttacgcgttatgaattagaattacagccgggggtgaaagcatcaaaagtcacgagcatcgataccgatttagcaagagcattgatgtttcgttctattcgtgtggcagaggttattccaggtaaaccttatattggtattgaaaccccaaatcttcatcgtcaaatggtgccattacgtgatgtgttagatagcaatgaattccgtgatagcaaggcaactttacctattgctttaggtaaagatattagtggcaaaccagtcattgttgatttagcaaaaatgccacatttattggtagcaggttctacgggatcaggtaagtctgttggtgtgaatacgatgattctaagtttactttatcgtgttcaaccagaagatgtgaaatttattatgattgatcctaaagtcgtcgaactttctgtttataatgatattccgcatttactgacaccagttgtaacggatatgaaaaaagcctctaatgcgttgcgttggtgcgtagatgaaatggaacgtcgttatcagttgctttcagctttacgcgtacgaaacattgaaggctttaatgaaaaaattgatgaatacgaagcaatgggaatgcctgtgccaaatccaatttggcgacctggcgatacgatggatgcaatgccaccagcgttgaaaaaattgagttatattgtggttattgtcgatgagtttgctgatttaatgatggtggccggtaagcaaatcgaagaactgattgcacggttggcacaaaaagcgcgagctattggtatccatttaattttagccacacaacgcccctctgtggatgtgattactggtttaattaaagcaaatattccaagtcgcattgcctttacggtggcaagtaaaattgactcacgtactattcttgatcaaggtggcgctgaggctcttttaggtcgtggagatatgctttattctggacaaggttcatctgatttaatccgcgtacatggagcctatatgagtgatgatgaagtcatcaatattgccgatgattggcgagcacgcggtaaacctgattatattgatggaattttagaaagtgcagacgatgaggaaagttcagaaaaagggatatcaagcggtggagaattagatccactctttgatgaagtaatggactttgttattaatactggtacaacttcagtatcttctattcaacgtaaattcagcgtgggttttaaccgagcagcgcgtattatggatcaaatggaagaacaagggattgtcagcccaatgcaaaatggtaagcgtgaaattttatcgcatcgtccagaatactaa

SEQ ID NO: 3332 - protein, 909 aa, Haemophilus influenzae
MIKQITERFTPRQYLAEFLLGLTALFGLYLIVAWSSYTPLDNSWATASAYGNTINKVGSFGAWIIDLFFVFLGYVAHIIPFTAFLVPIYLLKTKAVKQLSCTRIILRSFGFTMLIIGLCVVSMLLLSSNTFYLSGGVLGGSLVVNWFYPVLGKFGSILIGFVLALIGFIFCSGASLIRLIVAFYHWLTMKNEQSENAEQEKSTEELEQIVIVKSDRSETENLDQNHLNVEQNSEIETQKSSLEAEESSVEQPSHLINIHGLNPEVSIKSEYELANEENEKPQFSFGFDSESLPSVNLSSDSDEQRVSKNDFVAVWNKPVKTVVQEDLAINQSADDFTQVSLLTKDEMPTVLLRPSHESLNTEMVDLEKDGVKFNVSLEDDMEAVQLDKNQEPNYKGYSGSLIHPAFQQQTTKREKPSTPLPSLDLLLKYPPNEQRITPDEIMETSQRIEQQLRNFNVKASVKDVLVGPVVTRYELELQPGVKASKVTSIDTDLARALMFRSIRVAEVIPGKPYIGIETPNLHRQMVPLRDVLDSNEFRDSKATLPIALGKDISGKPVIVDLAKMPHLLVAGSTGSGKSVGVNTMILSLLYRVQPEDVKFIMIDPKVVELSVYNDIPHLLTPVVTDMKKASNALRWCVDEMERRYQLLSALRVRNIEGFNEKIDEYEAMGMPVPNPIWRPGDTMDAMPPALKKLSYIVVIVDEFADLMMVAGKQIEELIARLAQKARAIGIHLILATQRPSVDVITGLIKANIPSRIAFTVASKIDSRTILDQGGAEALLGRGDMLYSGQGSSDLIRVHGAYMSDDEVINIADDWRARGKPDYIDGILESADDEESSEKGISSGGELDPLFDEVMDFVINTGTTSVSSIQRKFSVGFNRAARIMDQMEEQGIVSPMQNGKREILSHRPEY

SEQ ID NO: 3333 - DNA, 501 bp, Haemophilus influenzae
atgtgcaaagaaataaagaaaatggaaaaaaaacgaaataaagcattggatgcgatagatataaaaattctgaatgaattacaacgcaacggtaagatttccaatatcgatttgtcgaaaaaagtggggctttcgccaacaccttgtttagaacgagttaaacgtttggaaaaacaaggtgtgattatggggtatcgcgcactgttaaatccagaattattggatgcaccattgttagtgattgttgaaattacattagtacggggtaagcccgatgtgtttgaagaatttaatgcagcgattcaagcattggaagaaattcaagaatgccatttggtatcgggcgattttgattatttattaaaaactcgtgtggcagatatggcggaataccgaaaattgctaggcacgacattgttacgtttaccaggtgtaaatgacacgcgcacttatgttgtgatggaagaagtaaaacaaaccaatttccttgtattgaaataa

SEQ ID NO: 3334 - protein, 166 aa, Haemophilus influenzae
MCKEIKKMEKKRNKALDAIDIKILNELQRNGKISNIDLSKKVGLSPTPCLERVKRLEKQGVIMGYRALLNPELLDAPLLVIVEITLVRGKPDVFEEFNAAIQALEEIQECHLVSGDFDYLLKTRVADMAEYRKLLGTTLLRLPGVNDTRTYVVMEEVKQTNFLVLK

SEQ ID NO: 3335 - DNA, 1377 bp, Haemophilus influenzae
atggctaaagccccgaaaacagcttatgtatgtaacgattgtggtgcggagttttctcgttggcaagggcaatgttccgcttgtaaagcgtggaatacaatcacggaagtgcggttaatttccacggcaaaatcaaaaaatgatcgttttagtggttatgcgggggaaactcaggcaaaaattcaaacgctctctgaaattagtttgcaagaaacgcctcgtttttccagtggttttagtgaattagatagggttttgggcggcgggatcgtaccggggagtgcgattttaattggagggcatcctggagcaggaaaaagtacattgttactacaggttatgtgtggtttggcaaaaaatatgaccgcactttatgtaacgggagaggaatcattacaacaggttgcgatgcgcgcaagccgattgggattgccaaatgatcaattaaaaatgttgtcagaaacctctgtggaacagatttgtaatttggcggatcaattaaaaccgcaaattatcgtggtggattctatccaagtaatgcatttggcagatattcaatcatcgccaggaagtgtggcacaagtgcgtgaatgtgcttctttcctcacccgttatgcgaaaactcgccaagtggcgattattatggttggacacgttacgaaagacggaacccttgcagggcctaaagtgttagagcatgctattgactgttcattactattagaaggcgaagccgattctcgttatcgtactttgcgtagccataaaaaccgttttggtgcagtcaatgaattaggtgtatttggaatgacagagcagggtttgcgcgaagtgaaaaatccatcggcgatctttttaagtcgcggagatgaaattacgtcaggcagctccgttatggtgctttgggagggtactcgtcctcttttagtggaaattcaagccttggtggatcattcaatgctggcaaatcctcgccgtgttgcggtgggattagagcaaaatcgcttagcgctattactggcggttttacatagacacggaggtttgcaaatggcggatcaagatgtttttgtaaatgtggttggtggtgtaaaagtcagtgaaaccagtgcggatttagctttgttgcttgcgttaatttcaagtttccgtaatcgccctttgccgcaagatttagtgatttttggcgaagttggattagcgggagaaattcgtcctgtgccaagtggacaagaacgtattagcgaggctgcaaaacacggttttaaacgtgctattgttccttttggtaacaagccgaaaagtgcggtcgaaaatatgcaggtttttactgtgaaaaaactcacggatgcgctcgctgtgttagataatttataa

SEQ ID NO: 3336 - protein, 458 aa, Haemophilus influenzae
MAKAPKTAYVCNDCGAEFSRWQGQCSACKAWNTITEVRLISTAKSKNDRFSGYAGETQAKIQTLSEISLQETPRFSSGFSELDRVLGGGIVPGSAILIGGHPGAGKSTLLLQVMCGLAKNMTALYVTGEESLQQVAMRASRLGLPNDQLKMLSETSVEQICNLADQLKPQIIVVDSIQVMHLADIQSSPGSVAQVRECASFLTRYAKTRQVAIIMVGHVTKDGTLAGPKVLEHAIDCSLLLEGEADSRYRTLRSHKNRFGAVNELGVFGMTEQGLREVKNPSAIFLSRGDEITSGSSVMVLWEGTRPLLVEIQALVDHSMLANPRRVAVGLEQNRLALLLAVLHRHGGLQMADQDVFVNVVGGVKVSETSADLALLLALISSFRNRPLPQDLVIFGEVGLAGEIRPVPSGQERISEAAKHGFKRAIVPFGNKPKSAVENMQVFTVKKLTDALAVLDNL

SEQ ID NO: 3337 - DNA, 1047 bp, Haemophilus influenzae
atgttacaagaaattgaattaaaattggcgatttcgccacaaataggtattgaattgccacaatatcttgcaaaatttacgattttagaacatcaaaatttatttttgggtaacacctattatgattatcccgatcattttcttgctaaacaaaaaatggggttgcgtattcgtcaagaagatcaagaacttacattaacgcttaaaactaacggcgaagttgttggtggattgcatagtcgtccagaatataatttaccattaaccgaaaaagaaacgccaaccaatgcgcaattaagagaactttattcttttgaacaattacctagttctacactacaacctattttctccacagattttaaccgcactttttggttagttgaatttcaacaatccaaaattgaagtggcattcgatcaaggcaaaattattgcaggcgaatatgaacagcctatttgtgaaattgaatttgaattgaaatctggcaatgtgcaggatctttttgattttgtggaaattttgcctttcgaaagagatatttattttagtagtgaaagtaaagcgaagcggggttatttgttaggttcaaaacaatttttgacggattggatcaataaatggcgtgattttttaaaagaagaacgagaagaaagtgcggtagatttttgtgcaaaatttaattccgtgttgaaaatggaacagaaacttttggaagaaaccttatcattttctcccgcactttttagccaagattttatgaaaacagtggagcgagtcggggcattttttaatctttatcattattatgatgaaaatgggaaaatcttagaagcggtggcaacagaaaaacaaaaagaaacgcgcttaccagctttgttagaaagcaatcagaaaatctttgctgaaatccgtgatttgattcgttttcacagtgaaacgaaagacaatgaaaaaactattgaaaaattgaccgcacttttgaaaagtcgagtttattttgagcgaatgatcaaattaatggaattatcttatgacctagggtag

SEQ ID NO: 3338 - protein, 348 aa, Haemophilus influenzae
MLQEIELKLAISPQIGIELPQYLAKFTILEHQNLFLGNTYYDYPDHFLAKQKMGLRIRQEDQELTLTLKTNGEVVGGLHSRPEYNLPLTEKETPTNAQLRELYSFEQLPSSTLQPIFSTDFNRTFWLVEFQQSKIEVAFDQGKIIAGEYEQPICEIEFELKSGNVQDLFDFVEILPFERDIYFSSESKAKRGYLLGSKQFLTDWINKWRDFLKEEREESAVDFCAKFNSVLKMEQKLLEETLSFSPALFSQDFMKTVERVGAFFNLYHYYDENGKILEAVATEKQKETRLPALLESNQKIFAEIRDLIRFHSETKDNEKTIEKLTALLKSRVYFERMIKLMELSYDLG

SEQ ID NO: 3339 - DNA, 717 bp, Haemophilus influenzae
atgcagcctaagtcatcattgaaagaaactcagcaagcattggcaaatgctattcggttaggtaatgcagatcctttaaatggttatgctgcaagccgtttagcggtatatacacgtttagttcgtaataatgcttttggttttattgatcgttgttttgttgaagcaccattgcatattgagccagagtattggaaaaatgctaaagaaaattttgtgcaaaatggtaatgcccattctccttatttccaagatattgcaggagaatttctctttttttgtcaagaaaaagagatatttgatacaaatatattggcattgatggattttgaaaatacacaattactcgcagaagtttctttagccaaagtgcctgaaaaatttgagtggaatagacatagcgtaatgcaattatctggtgcagcttatttaaaaagttatgacgttgattttttatcaagtgactttaaacaatttgatgatacgccaattcaagttattgtatggcgtgatagtgattttaggattcagcaacaaatcctttcagagttagattactggttgttaagttatctacaagaacaaccaaattcattagaaaatgttttgtctgcacttaatacaatggttgaagacagtacatcaataatcccattattagagcaagtatggatgaaatgggttacatctgaagtaatttaccccgaacaaagataa

SEQ ID NO: 3340 - protein, 238 aa, Haemophilus influenzae
MQPKSSLKETQQALANAIRLGNADPLNGYAASRLAVYTRLVRNNAFGFIDRCFVEAPLHIEPEYWKNAKENFVQNGNAHSPYFQDIAGEFLFFCQEKEIFDTNILALMDFENTQLLAEVSLAKVPEKFEWNRHSVMQLSGAAYLKSYDVDFLSSDFKQFDDTPIQVIVWRDSDFRIQQQILSELDYWLLSYLQEQPNSLENVLSALNTMVEDSTSIIPLLEQVWMKWVTSEVIYPEQR

SEQ ID NO: 3341 - DNA, 924 bp, Haemophilus influenzae
atgaaattacaaggcgctggactaggttatcgtcggaatttagctgaggattttttacaacttccctcaaataacgctattcaatttattgaagtcgcaccagaaaattggagtaaaatgggtggaatggcacgttatcaatttgatcaagcagcagaaagatttccgttagcagtacacggtctttcactttctttaggtgggcaagcaccacttgatcgcgaattactccgtaatacgaaagcattaattaatcaatataattcgtctttcttttctgaacatttaagttattgtgaatgtgaagggcatttatatgatttattacctatgccatttacagaagaagcagtaaaacacgtttcacaacgaatacgtgatgtgcaagatttcttaggattacaaatttcattagaaaatacttcttattatttgcattctcctactagcacaatgaatgaagtggaatttttaaatgctatcgcacaagaggctgattgtggcattcatttagatgtgaataatatttatgttaatggtgttaatcacggattgcttgatccttatatctttttagatcaagttgatgttaaacgtgttaattacattcatattgcagggcacgatgaagaacattctgctgcacaagttgtagagaattcagcaaatgaatcatttaataaagtaaaaggagcatatcgccatttacctgaattattaattgatacacacggagaagctgtaaaaggcactgtatgggatttactcgaatatgcctatcaacgactacctacgattcctccaacattattggagcgtgattttaacttcccaccatttgcagaactttacgccgaagttgagcatattgcacaattacagcaaaaatacgctcacacagaggtaatgtcttatgcagcctaa

SEQ ID NO: 3342 - protein, 307 aa, Haemophilus influenzae
MKLQGAGLGYRRNLAEDFLQLPSNNAIQFIEVAPENWSKMGGMARYQFDQAAERFPLAVHGLSLSLGGQAPLDRELLRNTKALINQYNSSFFSEHLSYCECEGHLYDLLPMPFTEEAVKHVSQRIRDVQDFLGLQISLENTSYYLHSPTSTMNEVEFLNAIAQEADCGIHLDVNNIYVNGVNHGLLDPYIFLDQVDVKRVNYIHIAGHDEEHSAAQVVENSANESFNKVKGAYRHLPELLIDTHGEAVKGTVWDLLEYAYQRLPTIPPTLLERDFNFPPFAELYAEVEHIAQLQQKYAHTEVMSYAA

SEQ ID NO: 3343 - DNA, 288 bp, Haemophilus influenzae
atgaaaaaattagcaacattaacagcattagcaggtgcattaacgatggcagtagcgacagcagcacaggctgaatcaaagtcaagcagtactgataatacagcaacaccttgtgtgggcgataaatgtgtcaaaacaaaagctgcagaaggtaaatgtggtgaaggcaaatgcggtgcagacaaagctaaatctgctgaaggtaaatgtggcgagggtaaatgtggtgcgagcaaaccgaaagctgctgaaggcaaatgtggcgaaggtaaatgcggttctaaataa

SEQ ID NO: 3344 - protein, 95 aa, Haemophilus influenzae
MKKLATLTALAGALTMAVATAAQAESKSSSTDNTATPCVGDKCVKTKAAEGKCGEGKCGADKAKSAEGKCGEGKCGASKPKAAEGKCGEGKCGSK

SEQ ID NO: 3345 - DNA, 318 bp, Haemophilus influenzae
ttgttacgccagcataattattattcttatttagaaccgcatttaccttcgccacatttgccttcagcagctttcggtttgctcgcaccacatttaccctcgccacatttaccttcagcagatttagctttgtctgcaccgcatttgccttcaccacatttaccttctgcagcttttgttttgacacatttatcgcccacacaaggtgttgctgtattatcagtactgcttgactttgattcagcctgtgctgctgtcgctactgccatcgttaatgcacctgctaatgctgttaatgttgctaattttttcatttga

SEQ ID NO: 3346 - protein, 105 aa, Haemophilus influenzae
MLRQHNYYSYLEPHLPSPHLPSAAFGLLAPHLPSPHLPSADLALSAPHLPSPHLPSAAFVLTHLSPTQGVAVLSVLLDFDSACAAVATAIVNAPANAVNVANFFI

SEQ ID NO: 3347 - DNA, 441 bp, Haemophilus influenzae
atgcaaagtatcggcagtggcgtaagtttattgattttacgcttttttctcgcatgggagttttttgaatcaggattagaaaaatggaatggacaaaattggttcgctgaaatacaagatcgttttccttttccatttaatcttattcctgccgatattaattggcacgttgcaatgggatcagaattaattttcccattcttgctgatatttggggtgctaacacgttttagtgcattaagtttaacgattttaatctctgtcgcgtggtatagcattcacgccgattcaggttataacgtatgtgataatggttataaattaccattaatttatgtggtgactttattaatcttaattacgcagggagcggggaaactctctttagacacgcttattaagaaggtttatccaactaaaagctggttgaaatttctctaa

SEQ ID NO: 3348 - protein, 146 aa, Haemophilus influenzae
MQSIGSGVSLLILRFFLAWEFFESGLEKWNGQNWFAEIQDRFPFPFNLIPADINWHVAMGSELIFPFLLIFGVLTRFSALSLTILISVAWYSIHADSGYNVCDNGYKLPLIYVVTLLILITQGAGKLSLDTLIKKVYPTKSWLKFL

SEQ ID NO: 3349 - DNA, 681 bp, Haemophilus influenzae
atggcaatgaataatattctcggattatttgcccattcgcctctcaaaccgttacaaaaacactctgaaaaagtgaccgaatgtagcgatcttttgattcctttttttcaaactactttctcaaagaattgggaacaagcggaagaaaaacgcttagaaatttctcaatgtgaacgcgaagcagatagtttaaaacgtgaaattcgattgaaattgccacgtggtttattcttacctatcgatcgtactgatcttttagaattagtcacgcaacaagataaacttgccaattatgccaaagatattgcaggccgtatgattggtcgtcaatttggtattcctgaagaaatgcaagaagaattcttacattacgtaaaacgaagtttagatgctattcatcaagctcaccgagtaatagaagaaatggataagctattagaaacgggttttaaaggccgtgaactcaaattagtcaatgatatgattcaagaacttgattcaattgaagatgatacagaccaaatgcaaatcaaattgcgtaaaatgctttacaccatcgaaagccgttataatccaattgatgtaatgttcttatataaaattattgaatgggttggcgttttggctgaccaagcacaacgtgtcggttcgcgcattgaattaatgctcgcacgttcataa

SEQ ID NO: 3350 - protein, 226 aa, Haemophilus influenzae
MAMNNILGLFAHSPLKPLQKHSEKVTECSDLLIPFFQTTFSKNWEQAEEKRLEISQCEREADSLKREIRLKLPRGLFLPIDRTDLLELVTQQDKLANYAKDIAGRMIGRQFGIPEEMQEEFLHYVKRSLDAIHQAHRVIEEMDKLLETGFKGRELKLVNDMIQELDSIEDDTDQMQIKLRKMLYTIESRYNPIDVMFLYKIIEWVGVLADQAQRVGSRIELMLARS

SEQ ID NO: 3351 - DNA, 1263 bp, Haemophilus influenzae
atggaaattattagtcaatatggttcttggttggtgtggatcacagcagcctttggcttttttatggcgttcggaattggagcgaatgatgtctcaaactcaatgggaacatcagtaggatctggtaccataaccgccaaacaagcaattattatcgcattaatttttgaatctgctggtgcctatctagcaggtggtgaagtaacacaaaccattaaaagtggtgtaatcgatccaatgcaatttgtcgatacgccagatattttagctctaggtatgctttcaaccttatttgcatcgggtgcttggttatttattgcaaccaaaatgggttggccagtttctggtacacacactattattggtgcaattattggatttgcctgtattacgattggccctagttctgtagattggtcaaagattggcagcatcgttggtagctggtttgtcacgcctgtcattgcgggtattttggcttatgcaatctttgcaagtacgcaaaaacttatttttgataccgaacaaccactaaaaaatgcaaaaaaatatggcccttattatatggggataaccgtatttgtactttgtatcgtgacgatgaaaaaaggcttaaaacacgtaggcttaaatctttcaaacagtgaaactttaatcatttcacttgccatcagtcttatcggaatgtttttcttccatttctattttaaaagcaaaaccttcactcaatcagcaaacaaaggcacttttggtgcagtagaaaaagtcttcagtattttaatgttattaaccgcttgtgcgatggcatttgcgcacggttctaatgacgtagccaatgcaattggccctctttctgcagtggtctctattgtaaatgaaggcggtaaaattgtttcaggtggagccttaacttggtggattttacccttaggtgcattaggtattgcagtaggcttaattactatgggacaaaaagtgatggcgactgttggatctgggattaccgatttaacgccaagccgtggctttgctgctcaatttgctacagcgatgaccgttgtcgtggcatcaggcacaggcttacccatctcaacaacacaaacacttgttggagctattttaggtatcggctttgcacgtggtatcgcagcactgaatttaacggttatccgaaatatcattagttcttggattgtcacattaccagcaggtgcattttttgccattattattttctatgtgctaagaactatctttaattaa

SEQ ID NO: 3352 - protein, 420 aa, Haemophilus influenzae
MEIISQYGSWLVWITAAFGFFMAFGIGANDVSNSMGTSVGSGTITAKQAIIIALIFESAGAYLAGGEVTQTIKSGVIDPMQFVDTPDILALGMLSTLFASGAWLFIATKMGWPVSGTHTIIGAIIGFACITIGPSSVDWSKIGSIVGSWFVTPVIAGILAYAIFASTQKLIFDTEQPLKNAKKYGPYYMGITVFVLCIVTMKKGLKHVGLNLSNSETLIISLAISLIGMFFFHFYFKSKTFTQSANKGTFGAVEKVFSILMLLTACAMAFAHGSNDVANAIGPLSAVVSIVNEGGKIVSGGALTWWILPLGALGIAVGLITMGQKVMATVGSGITDLTPSRGFAAQFATAMTVVVASGTGLPISTTQTLVGAILGIGFARGIAALNLTVIRNIISSWIVTLPAGAFFAIIIFYVLRTIFN

SEQ ID NO: 3353 - DNA, 612 bp, Haemophilus influenzae
atgaaaaagatctataaagccttaatctcatctttacttttaagtacatcaataaatgttgcttatgcggaaacccaatatgttactgaaaatttaagtactttcttacgtcgtggtgctggcgaacaatttaaaattgcaggttcaattcaagcaggcgaagcggtgaatgtattagaacgccaaggcaaatacacactcattcgcgacaataaaaatcgtgaagcttggattttaaattcagacttaagtagcacgccaagtagtaaagaagaaaatccaaaattaaaagcgcaagtccaagaattaaccttaaaacttagtcgtttagatggcgattggcaacagcgtaccgtcgaaatgcaacgtcgaaccaaacaagctgagcaacaaagtgcggatcttttagaacaaaattcacaattgaaacgtgaacttgaaatgaccaaaaataaaaatcgtgatttagaagcgatacttgatgcaggtaaacgagaaattgcgatccaatggtttatttatggcggttcagtattaggcgtaggcttactcttcggcttgctcattccttatgtgttaccaaaacgtcgccgtcgtgatggctgggaataa

SEQ ID NO: 3354 - protein, 203 aa, Haemophilus influenzae
MKKIYKALISSLLLSTSINVAYAETQYVTENLSTFLRRGAGEQFKIAGSIQAGEAVNVLERQGKYTLIRDNKNREAWILNSDLSSTPSSKEENPKLKAQVQELTLKLSRLDGDWQQRTVEMQRRTKQAEQQSADLLEQNSQLKRELEMTKNKNRDLEAILDAGKREIAIQWFIYGGSVLGVGLLFGLLIPYVLPKRRRRDGWE

SEQ ID NO: 3355 - DNA, 1251 bp, Haemophilus influenzae
atgaaagtttatttggttggaggggctgttcgcgatcaattattggggttaccagtaaaagatcgtgattggattgtggtaggcacagaccccgctacgctactctctctcggttatcagcaagtaggcaaagattttccggtttttctcaatcctaaaacaaaagaagaatatgcgcttgcccgaacagaacgtaaatctagcgcaggttacactggctttatttgtgatttctccccaacaatcacattagaacaagatttaattcgacgagatctgactattaacgcgatggctcaaagcgaagacggtgaaattatcgatccttatggcggaaaacaagatttagaaaatcgaattttacgccatatttctcccgctttttcagaagatcctttacgtgtattgcgcgtggcacgctttgcagcccgttatcattctctcggtttcaaaattgcctcggaaacattagctctaatgacagaacttgccctatcgggagaattacaacatctcacgacggaacgcatttggctagaaacagaaaaagccttaaacgaaaaaaatcctgaaatttattttgaaaccttacataaaacaggcgcattaagcgttttattttctgaaattgatgcccttcatggggtgccaaatccagtaaaacatcatcccgaagtggacagttttattcataccatgttggtattaaaacaaacagttcatttaactgaaaataaccataatctaaacaaaagtgcggttcgttttgcggctatttgtcatgatcttggcaaggctcttacacctcaaaatattcttcctcatcattatgggcatgaacaagctggcataaaaccgactagatcattgtgcaaacgcttgaaagtcccaagttattttcaagaacttgcagaactgacttgtgaatttcacacgcatattcacaaagcctttgagcttcgagctgaaaccgtcataacgctgtttaatcgttttgatgtgtggagaaaaccacaacgctttcaagaatttctacaagtatgtctagctgatactcgaggaagaacaggttttgaaaataaagactatccacaaatagattacatcaatcaattattacactctgcaaatgaagtagatgtacagcaagttattgccgatggatttgagaaacaagcaatcaaaaatgaattaacgaaacgaagaatcttagcggttaaacaaacaaaaacgaattacccaacaaattaa

SEQ ID NO: 3356 - protein, 416 aa, Haemophilus influenzae
MKVYLVGGAVRDQLLGLPVKDRDWIVVGTDPATLLSLGYQQVGKDFPVFLNPKTKEEYALARTERKSSAGYTGFICDFSPTITLEQDLIRRDLTINAMAQSEDGEIIDPYGGKQDLENRILRHISPAFSEDPLRVLRVARFAARYHSLGFKIASETLALMTELALSGELQHLTTERIWLETEKALNEKNPEIYFETLHKTGALSVLFSEIDALHGVPNPVKHHPEVDSFIHTMLVLKQTVHLTENNHNLNKSAVRFAAICHDLGKALTPQNILPHHYGHEQAGIKPTRSLCKRLKVPSYFQELAELTCEFHTHIHKAFELRAETVITLFNRFDVWRKPQRFQEFLQVCLADTRGRTGFENKDYPQIDYINQLLHSANEVDVQQVIADGFEKQAIKNELTKRRILAVKQTKTNYPTN

SEQ ID NO: 3357 - DNA, 621 bp, Haemophilus influenzae
atgaaaacgtttaaatttctcaccgcactttttgtcactgcgattctaaccgcttgcacattagatatggaacgtcctactaatgtacaatacattgataaaacggatgcgatatggcaacaacatttacaaaagattcaaaaaattcaatcctatcaagccaaaggacaaattggttatatcagtcctacagaacgtttttctagccgctttgaatggcaataccaaaatccaaaatcttatacgcttaaactctattctttaatcagtaaatctaccctgttgattcaaatgcatcaaagcgggatgacaatttccgataacaacggtaatcaacaatctgcagccaatgcgaaacaattattacaagagatcattggaatggacattcctttagaacatttagtttattggttgaaaggccaaccagcaatgaatgcagattatcaagtgggtaccaaccatttacttggtgcatttacttatcatgtggatggttctcaatggacggcagattatctaacctatcactcaaataattcgatgcctgaaaatattttgctgaaaaatgacagcacaaaacaaaccttaaaaattcgcgtagacgagtggatttactaa

SEQ ID NO: 3358 - protein, 206 aa, Haemophilus influenzae
MKTFKFLTALFVTAILTACTLDMERPTNVQYIDKTDAIWQQHLQKIQKIQSYQAKGQIGYISPTERFSSRFEWQYQNPKSYTLKLYSLISKSTLLIQMHQSGMTISDNNGNQQSAANAKQLLQEIIGMDIPLEHLVYWLKGQPAMNADYQVGTNHLLGAFTYHVDGSQWTADYLTYHSNNSMPENILLKNDSTKQTLKIRVDEWIY

SEQ ID NO: 3359 - DNA, 942 bp, Haemophilus influenzae
atgaaatcacatcaattttctaccgcactttgccaaaatacaacacaatcaaatgggcagccattacgcttccctagccctgccaaactgaatttatttctttatatcaatggaaaattgccgaacggctatcatgaattacaaacgcttttccaatttttagattttggcgattggttagacattagtattcgggaacaagataatcaaattgttttaacgccagaaattccaaatctaaaaacggaaaataatctaatttatcgagccgcaaaacttttacaagaaaaagccaatattcaattgggtgcaaatattcatttagataaaattcttccaatgggaggcggtgttggtggtggttcatccaatgcagcaaccgcattggtcgctttaaattatttatggcaagccaatttatccattgatgaactggcaaaattgggattaacattaggcgcggatgtgccaatatttgtatacggacaggctgcttttgctgaaggcgttggggaaaaaatcacttattgtgaacctgccgaaaaatggtttgttatattaaaacccgatgattcaatatcgacggctgtcatctttcaagatccaaatttaccacgtaatacaccgaaaaaatccctaaaacaacttttgagtgaaccttataaaaacgattgcgaaaaagttgtgataaatcattattcaaacgttgaaaaagcgttaaactggttgctacaatatgcgccggcaagattaacaggaacgggagcctgtgtttttgctgaatttgatcatgaagcagaagcgcaagcggtatttagaaaaaaaccagaagcattttttggtttcgtcgctaaaggactcaatgtgtctcccttgcacgcaatgttgaagcagctatcatcaactcatactcatcgacaatctaaacctgaggttttataa

SEQ ID NO: 3360 - protein, 313 aa, Haemophilus influenzae
MKSHQFSTALCQNTTQSNGQPLRFPSPAKLNLFLYINGKLPNGYHELQTLFQFLDFGDWLDISIREQDNQIVLTPEIPNLKTENNLIYRAAKLLQEKANIQLGANIHLDKILPMGGGVGGGSSNAATALVALNYLWQANLSIDELAKLGLTLGADVPIFVYGQAAFAEGVGEKITYCEPAEKWFVILKPDDSISTAVIFQDPNLPRNTPKKSLKQLLSEPYKNDCEKVVINHYSNVEKALNWLLQYAPARLTGTGACVFAEFDHEAEAQAVFRKKPEAFFGFVAKGLNVSPLHAMLKQLSSTHTHRQSKPEVL

SEQ ID NO: 3361 - DNA, 948 bp, Haemophilus influenzae
atgcctgacattaaactcttcgcgggtaatgctacacctgaacttgcaaaacgtatttctgaacgtttatatatttcactaggcgatgcaacagtcgctcgtttcagcgatggagaaattcaagttcaaattaatgaaaatgtgcgtggtgcggatgtatttatcatccaatcaacttgtgcgccaaccaatgataacttgatggaattggttgtgatggtagatgcgttacgtcgcgcatctgctggtcgtattactgccgtgattccttatttcggctatgctcgccaagatcgtcgtgttcgttctgctcgtgtgcctattaccgctaaagttgtggcagatttactttcaattgttggtattgaccgtgtcttaacctgtgacctacacgcagaacaaatccaaggtttctttgatgttcccgtagacaacgtatttggttcgccagttttaattcacgatattttgaaaaaatctgatcttgaaaatccaattgttgtttccccagatattggcggcgttgtgcgtgctcgcgctgtcgctaaattattaaacgatacggatatggctattattgacaaacgtcgccctcgtgcaaatgtagcacaagtgatgcatattatcggtgatattgcagaccgtgattgtattttggttgatgatatgattgatactggcggtacgctttgtaaagcggcagaagcattaaaagaacgtggtgcaaaacgtgtttttgcttatgcaactcacgccgttttctctggtgcagcagccaaaaatttagccagcgatgccattgatgaagttgtagttactgacacgattcctctatcagaagaaatgaaagcgatcggtaaagttcgcgtgcttacgctttcttccatgctggcagaagccattcgccgcattagcaacgaagaatctatttctgcgatgtttaactaa

SEQ ID NO: 3362 - protein, 315 aa, Haemophilus influenzae
MPDIKLFAGNATPELAKRISERLYISLGDATVARFSDGEIQVQINENVRGADVFIIQSTCAPTNDNLMELVVMVDALRRASAGRITAVIPYFGYARQDRRVRSARVPITAKVVADLLSIVGIDRVLTCDLHAEQIQGFFDVPVDNVFGSPVLIHDILKKSDLENPIVVSPDIGGVVRARAVAKLLNDTDMAIIDKRRPRANVAQVMHIIGDIADRDCILVDDMIDTGGTLCKAAEALKERGAKRVFAYATHAVFSGAAAKNLASDAIDEVVVTDTIPLSEEMKAIGKVRVLTLSSMLAEAIRRISNEESISAMFN

SEQ ID NO: 3363 - DNA, 1188 bp, Haemophilus influenzae
atgactgacattaataccgttctcgcggaactaaagcgtggtactgatgaaatcctttcagaagcggatttaatcgaaaaattgaaagaaaatcgcccattaaaagtaaaattaggcgcagatccaactgcaccagatattcatttaggacatactgttgtattaaacaaattacgtcaatttcaacaactcggtcatgaagtctatttcttaattggcgattttactggaatggtgggcgatccatcaggtaaaaatgcgactcgtcctccacttagccgtgaagatgtattgcgcaatgcggaaacctataaagagcaaatttataaaattctcgatcctcaaaaaaccaaaatcgtcttcaactctgaatggttaagcaaacttggtacagaaggtatgattcgccttgcaagcaactatacggttgcgcgtatgcttgaacgcgacgacttcaaaaaacgctttggcaacaaccaacccattgccatccatgaatttatttatccattactgcaaggctacgattccgttgcattagatgcagatgtggaactaggcggtacagaccaaaaattcaacttacttgttggtcgtgaattacaaaaatcagcaggcaaaaaaccacaggttgcgattacactcccattactcgttggcttagacggcgagaaaaaaatgtctaaatcacttggtaactatattggcgtaacggaagcaccaagcgatatgttcggtaaagtgatgtcaatttctgatgaactcatgtgggattggtataaccttctttcattccgtccattaagtgaaattgcacaattaaaatcggaagtagaaaacggcaaaaatccacgtgatgtaaaaatcttattagcaaaagaattaattgcacgtttccacaatgaagaggcagcaaacgctgcagaacaagaatttattaaccgtttccaaaaaggcgcaatgcctgatgaaatgcctgaatttacgttttctggcgaaattggtttagccaccttattaaaagaagcgggtcttgttccttccacttctgaagcgattcgctctgctcaacaaggcggtgtaaaaatcaatggtgaaaaagtcgataacgtaaaagataatgcaccgaaaggcacaaatgtttaccaagtgggtaaacgaaaatttgcgcgtgtgactgtggaataa

SEQ ID NO: 3364 - protein, 395 aa, Haemophilus influenzae
MTDINTVLAELKRGTDEILSEADLIEKLKENRPLKVKLGADPTAPDIHLGHTVVLNKLRQFQQLGHEVYFLIGDFTGMVGDPSGKNATRPPLSREDVLRNAETYKEQIYKILDPQKTKIVFNSEWLSKLGTEGMIRLASNYTVARMLERDDFKKRFGNNQPIAIHEFIYPLLQGYDSVALDADVELGGTDQKFNLLVGRELQKSAGKKPQVAITLPLLVGLDGEKKMSKSLGNYIGVTEAPSDMFGKVMSISDELMWDWYNLLSFRPLSEIAQLKSEVENGKNPRDVKILLAKELIARFHNEEAANAAEQEFINRFQKGAMPDEMPEFTFSGEIGLATLLKEAGLVPSTSEAIRSAQQGGVKINGEKVDNVKDNAPKGTNVYQVGKRKFARVTVE

SEQ ID NO: 3365 - DNA, 717 bp, Haemophilus influenzae
atgcaacttccagctttacaatcggcaaaattaattcgtcgttacaaacgctttcttgcggatattgaattgccaactggtgatgttatgacaattcattgtgccaatacaggtgcgatgactgggtgcggagagaaaggcgacacaatttggtattcacattccgatagtcaaactcgtaaatatccccattcttgggagcttactcaactcgcaaatggacaactttgctgtatcaatacccatcgttctaatcagcttgtctttgaagcattgcaaaataagcaaatcaaagaattggcaatgtatgatgaaatttaccctgaagtgaaatacggcgaagaaaatagccgaattgatttcttactaaaaggcgaaggcttgcttgattgttatgtagaagtgaaatcaatcacgcttgtaaaaggcaatttaggtatgtttcccgatgcggttactacgcgtggacaaaaacacgttcgagaattattggcaatgaaaaaacaaggtcatcgagcagtagtgctatttgctgggttacataatgggtttgatcgtttcaaaattgcggaatatatcgatcctgaatatgatcgcttattaaaagaagcaatggaacaaggtgttgaagcctatgcttatgcgggacaatttgaaatttctaatgaaattcctaccgcactttctttgacagaatcggtgccttatataaaataa

SEQ ID NO: 3366 - protein, 238 aa, Haemophilus influenzae
MQLPALQSAKLIRRYKRFLADIELPTGDVMTIHCANTGAMTGCGEKGDTIWYSHSDSQTRKYPHSWELTQLANGQLCCINTHRSNQLVFEALQNKQIKELAMYDEIYPEVKYGEENSRIDFLLKGEGLLDCYVEVKSITLVKGNLGMFPDAVTTRGQKHVRELLAMKKQGHRAVVLFAGLHNGFDRFKIAEYIDPEYDRLLKEAMEQGVEAYAYAGQFEISNEIPTALSLTESVPYIK

SEQ ID NO: 3367 - DNA, 1395 bp, Haemophilus influenzae
atgaattttcgtcttttatctcaataccacgctgatattaaaaagttgattaaaatttccttgcctattttattagcgcaaattgcacaaaactcaatgggattagcggataccattatggcggggcgagtgagttccactgatatggcagccatttctattggtgcttcaatttggatgccattgatgttttttgggcaaggtttattgttggcattgccgcctacaatttcttatttgaatggttcaggccaacaccatcgcattgcacatcaagttcgccaaggcatttggcttgtgttaggcgtgagtattcctttaggtttactgatttatttctgtgaaattccgctgcaatatatgcaaatggaaagcaaaatgtcagatttagcacgcgattatttacatgccatgttgtggggattgccagcttatttgatgctgattaattttcgttgtttaaatgatgggattgagaaaaccaagcctgcgatggtcattacctttttaggtttattgattaatattccgcttaattacatttttatttatggaaaatttggtatgcctgcttttggtgcggtgggctgtggtattgcgacagctattgtgaactgggcaatgtgcttaatgatgattttctattcctacacgaatactcaagaacgttcactaaaagtatttagtcaattaattgaaatgccaaatccgaaaacacttaaaaaattactgcgtttaggattacccattgccattgcaatttgttgcgaagtggcgttatatgcacttacgtccttaatgctttctccgttgggtgcaactattgtcgcaagccatcaaatcacattgaataccagttcttttatttttatgttccctatgtcgattggtatggcaacgacgattttagttggacaagcattgggtgcaggttctccacaaaatgcgaagaaaattggctatgccgcattattattagggctaactgtgacaattattactgcattaattacgatttttttccgttatgaaattgcctctattttcgtaacagatgaaattgtcattgcaatggcggcaaatttattattatttgccgcactttatcaattttcagataccattcaaatggtggttggtggcattttacgtggttataaagataccaaaatgattttatatattactcttttctcttattgggtaattggtgtgccacttggttatacgctcggtcgtacagattggcttgtgccacacattgatgcgaaaggtttctggattgcctttgtggtctcgctcacttttgcggcgatcttactttctttgagaatgaaaaaaatgcaagctatgaacgacaacgctattttacaacgtttagaaaaacttaaataa

SEQ ID NO: 3368 - protein, 464 aa, Haemophilus influenzae
MNFRLLSQYHADIKKLIKISLPILLAQIAQNSMGLADTIMAGRVSSTDMAAISIGASIWMPLMFFGQGLLLALPPTISYLNGSGQHHRIAHQVRQGIWLVLGVSIPLGLLIYFCEIPLQYMQMESKMSDLARDYLHAMLWGLPAYLMLINFRCLNDGIEKTKPAMVITFLGLLINIPLNYIFIYGKFGMPAFGAVGCGIATAIVNWAMCLMMIFYSYTNTQERSLKVFSQLIEMPNPKTLKKLLRLGLPIAIAICCEVALYALTSLMLSPLGATIVASHQITLNTSSFIFMFPMSIGMATTILVGQALGAGSPQNAKKIGYAALLLGLTVTIITALITIFFRYEIASIFVTDEIVIAMAANLLLFAALYQFSDTIQMVVGGILRGYKDTKMILYITLFSYWVIGVPLGYTLGRTDWLVPHIDAKGFWIAFVVSLTFAAILLSLRMKKMQAMNDNAILQRLEKLK

SEQ ID NO: 3369 - DNA, 615 bp, Haemophilus influenzae
atgtttactggaattgtccaaggcaccgtccctatccactccattaaagaaaaggctaattttagaacacaagtagtaaaattaccacctgaaatgcgtaaagatctggaaattggcgcatcagtagcaaataacggcgtatgtttaactgtaactgaaattaacggcgatctggttagctttgatctgatgcaagaaaccttaagaattacaaatctcggcacagtaaaagtgggcgattatgtgaatatcgaacgtgctatgcaaatgggaacggaaattggcggacatttattatctggtcatatttattgcaccgcaaaaatttcagatattatcgctagtgaaaataaccgacaaatttggttcgagctgccaagcgcagatgtaatgaaatatattttaacgaaaggatttgttgcggtagatggcattagcctcactattggcgaagtaagagacacacaattctgtgtgaatttaattcctgaaaccttgcaaagaactttaatggggcaacgtaaagtgggcgatattgtgaatattgaaatcgatcctcaaacgcaagccattgtagatacggtagaaaattatttgcagtcaaaaaatttttag

SEQ ID NO: 3370 - protein, 204 aa, Haemophilus influenzae
MFTGIVQGTVPIHSIKEKANFRTQVVKLPPEMRKDLEIGASVANNGVCLTVTEINGDLVSFDLMQETLRITNLGTVKVGDYVNIERAMQMGTEIGGHLLSGHIYCTAKISDIIASENNRQIWFELPSADVMKYILTKGFVAVDGISLTIGEVRDTQFCVNLIPETLQRTLMGQRKVGDIVNIEIDPQTQAIVDTVENYLQSKNF

SEQ ID NO: 3371 - DNA, 2610 bp, Haemophilus influenzae
atgttagccaaagcaaaatatagaaaagattacaaacaaccagattttacggtcacagatatttatttagattttcaacttgatcctaaacatactgtggtaaccgcaatcacaaaattccaacgcttaaataatgaagcgacttctttatgtttagacgggcatagcttccagttttcttctattaaatttaatggcgagccattttctgattatcaacaagatggcgagagtttaacgctcgatttaaaagacaaaagtgcggatgaatttgagcttgaaattgtgacgttccttgtgccagccgaaaatacgtcattacaagggctatatcagtctggcgaaggtatttgtacgcaatgtgaggcggaaggtttccgtcaaatcacttatatgcttgatcgtcctgatgtgctggcgcgttatacaaccaaaattacggcagataaaaccaaatatccattcttactgtcgaatggtaatcgcattgcaagtggcgaattagaagatggtcgccattgggtggaatggaatgatcctttcccaaaaccaagctatttatttgctttagtggcgggagattttgatttattacaagataaatttattactaaaagtggtcgtgaagtggctttagagctttatgtggatcgcggtaatcttaaccgtgcaacttgggcaatggaaagtctgaaaaaagcgatgaaatgggatgaagatcgctttaatttagaatatgacctagatatttatatgatcgttgccgtcgatttcttcaatatgggcgcaatggaaaataaaggattaaatatctttaactctaaatttgtgttggcaaatccacaaacggcaacagatgaagattatcttgccattgaaagtgtgattgcacacgaatatttccataactggacgggaaaccgtgtaacctgccgagattggtttcaactaagtttgaaagaaggtttaacggttttccgtgatcaagaattttcttcagatacaggttctcgtgcggtgaatcgcattaataatgtgaaatttttacgcaccgtgcaatttgccgaagatgcaagcccaatgtcgcacccaattcgccctgaaaaagtgattgaaatgaataacttttacacggtgacagtatatgaaaaaggggcagaagtgattcgtatgttgcacactttattaggggagcaaggcttccaaaaagggatgcaactttatattgctgaaaatgatggcaaagcggcaacctgtgaagattttgtttctgcgatggaacgggcaaataacctcgatttaaatcaattccgccgttggtatagccaatcgggtacaccagaattattgattagtgatgcttatgacgaaaaaacgcatacttatcgtttaatggtttcacaatccacaccgccaaccgcagatcaaatggaaaaagtgaatttacatattccattaaaagtggcactttatgatgcgaacggtacgaaacaaatgttacaacataatggcgaattgttgagtgatgtattgaatgttactgaaaaagaccaagtcttcgagtttaacggcatttatggtcgcccagttcccgcattgctatgtgatttttctgcgccagtaaaactggattatgattataaaacggagcagttattaggcttgcttaaatttgcagataatcaatttatccgttgggatgcggctcaaatgttatttgcgcaagaattgcgtcgtaatgttgtgcgtttccaacaaggcgagccactagaaatttcgcctgaaattttgactgcactttcttacgttctgaaccattatgagaaagatattgaactggcaaccttaattctcacactgccgaaagaaatggaatttgccgaggggttcaaaaccatcgatcctgatggtatttcagccgcaagagcatttatgcaagcgcaaattgctgaaactttaaaagatgatttcttgcgtgtttacacccatattcgtctcgatgattatcaagttacgcaacaagacatcgccttgcgtgcaatgcgtaatctttgcttaacttatttggcttacaccaatttgggcaacaacctagtccaaaaacactacaataatgcgaataatatgacagatacattggcggcattaagtgttgcaactaaagctgcattactttgcagagatgtgttattagctgattttgaacaaaaatggcaacacgatggattagtcatggataaatggtttgcattacaagccactcgcccagatgataatgtgttggaaattattcagttattaatggatcacccaagttttaactttaataatccaaaccgtttacgtgcattagtaggtagctttgcaaatcacaatttaaaagcatttcacaacgtaagcggttctggctatcgtttcttaacggatgtgttaatccgtttaaatgaaagtaatccgcaagtggctgcgcgtttaatcgagccattaattcgtttttctcgctttgatgcccaacgccaaacgctgatgaaacgtgctttagaacgcctaagcgttgtagaaaatctgtcaaaagatttatttgaaaaaattgagaaagcgttgcagtaa

SEQ ID NO: 3372 - protein, 869 aa, Haemophilus influenzae
MLAKAKYRKDYKQPDFTVTDIYLDFQLDPKHTVVTAITKFQRLNNEATSLCLDGHSFQFSSIKFNGEPFSDYQQDGESLTLDLKDKSADEFELEIVTFLVPAENTSLQGLYQSGEGICTQCEAEGFRQITYMLDRPDVLARYTTKITADKTKYPFLLSNGNRIASGELEDGRHWVEWNDPFPKPSYLFALVAGDFDLLQDKFITKSGREVALELYVDRGNLNRATWAMESLKKAMKWDEDRFNLEYDLDIYMIVAVDFFNMGAMENKGLNIFNSKFVLANPQTATDEDYLAIESVIAHEYFHNWTGNRVTCRDWFQLSLKEGLTVFRDQEFSSDTGSRAVNRINNVKFLRTVQFAEDASPMSHPIRPEKVIEMNNFYTVTVYEKGAEVIRMLHTLLGEQGFQKGMQLYIAENDGKAATCEDFVSAMERANNLDLNQFRRWYSQSGTPELLISDAYDEKTHTYRLMVSQSTPPTADQMEKVNLHIPLKVALYDANGTKQMLQHNGELLSDVLNVTEKDQVFEFNGIYGRPVPALLCDFSAPVKLDYDYKTEQLLGLLKFADNQFIRWDAAQMLFAQELRRNVVRFQQGEPLEISPEILTALSYVLNHYEKDIELATLILTLPKEMEFAEGFKTIDPDGISAARAFMQAQIAETLKDDFLRVYTHIRLDDYQVTQQDIALRAMRNLCLTYLAYTNLGNNLVQKHYNNANNMTDTLAALSVATKAALLCRDVLLADFEQKWQHDGLVMDKWFALQATRPDDNVLEIIQLLMDHPSFNFNNPNRLRALVGSFANHNLKAFHNVSGSGYRFLTDVLIRLNESNPQVAARLIEPLIRFSRFDAQRQTLMKRALERLSVVENLSKDLFEKIEKALQ

SEQ ID NO: 3373 - DNA, 642 bp, Haemophilus influenzae
atgaaaaaaacacttcttggtagcttaattttattggcatttgcgggaaatgtgcaggcggatattaatactgaaacatctggtaaagttactttttttggtaaggttgttgagaatacttgtaaagtgaaaacagagcataaaaatctgagtgtagtattaaatgatgtgggtaaaaatagcttatctactaaagtaaataccgcaatgccaacgccatttacgattacattacaaaattgtgacccaactacggcaaatggtactgcaaataaagctaataaagttgggctatatttctattcttggaaaaatgtagataaagaaaataactttacgttgaaaaatgaacaaactacggcagattacgcaactaatgttaatattcaacttatggaaagtaatggtacaaaggcgatttcagtagtgggtaaagaaacggaagattttatgcatacgaataataatggagtagcattaaaccaaacccacccaaataatgctcatatttcaggaagtacacaattaaccactggtactaatgaacttcctctccactttatcgcccaatattacgcaacaaataaagcaactgctggcaaagtacaatcctcagttgatttccaaattgcttacgaataa

SEQ ID NO: 3374 - protein, 213 aa, Haemophilus influenzae
MKKTLLGSLILLAFAGNVQADINTETSGKVTFFGKVVENTCKVKTEHKNLSVVLNDVGKNSLSTKVNTAMPTPFTITLQNCDPTTANGTANKANKVGLYFYSWKNVDKENNFTLKNEQTTADYATNVNIQLMESNGTKAISVVGKETEDFMHTNNNGVALNQTHPNNAHISGSTQLTTGTNELPLHFIAQYYATNKATAGKVQSSVDFQIAYE

SEQ ID NO: 3375 - DNA, 495 bp, Haemophilus influenzae
atgtcaaaaactgcacaaattgccgttgtgatggggtcaaaaagtgattgggctactatgcaagaggctactcagattttagatgaattaaacgtgccttatcatgtggaagtcgtctcggctcatcgtacgcctgataaactttttgaatttgccgaaaatgcacaaaaaaatggttacaaagtaattattgctggtgcaggtggtgcggcacatttacccggtatgatcgcagcgaaaacacttgtgccagtcttgggtgtgccagtaaaaagttctatgttaagtggcgtagatagcctttattcaattgtgcaaatgccaaaaggaatcccagtcggaacattagcgattggtccagcaggcgcggcaaatgctggattgttagccgcacaaattctagcaggttgggatgcagaattgctttcacgcttgcaatctttccgtgaaagccaaactcgtgctgtactggacaatcctgatccacgcacataa

SEQ ID NO: 3376 - protein, 164 aa, Haemophilus influenzae
MSKTAQIAVVMGSKSDWATMQEATQILDELNVPYHVEVVSAHRTPDKLFEFAENAQKNGYKVIIAGAGGAAHLPGMIAAKTLVPVLGVPVKSSMLSGVDSLYSIVQMPKGIPVGTLAIGPAGAANAGLLAAQILAGWDAELLSRLQSFRESQTRAVLDNPDPRT

SEQ ID NO: 3377 - DNA, 1089 bp, Haemophilus influenzae
atgcaaaactccaccttatacccaacggtttatgttctcggcaacggacaactcggcagaatgttaggttacgctggcgcacctttagatatttatgttgaacccttagccttcaatgcgccagtttttgacttacctgaaaatgcgatcatcactgcggaaattgaacgctgggaaaaaacgcctttgactgaattactcggcaatcataaaaacttcgttaatcaacatgtatttggattattagccgatcgttttactcaaaaatccttacttgatgaactcaatctttctacctctccttggtgtttattaaaagataaaacgcaatggaatgatgttttccaaactgttggcgagaaagtcgtcgttaaacgcagaacaggcggatatgatgggcatggtcaatggattatcagcgatgaaaacaaagcggacatcaccgatgacttattcggtgaagtgatcgcagaaaaatttattcctttcgattatgaagtttctattgtaggtacgagatttaaaaatggcgaaaagcgtttttatcccgttacacataacctgcaacaaaacggtattttgcgttacagtgtggttgatagtgcgtttcctcaacaatccgcacaacaaaaacaagcggaagccatgctcagcaaaattatggataaattaggctatgtgggtgtcatggcaatggaatgttttgttgtaggcgaaaaattgctgattaacgaacttgcgcctcgtgtacataacagtgggcattggacacaactaggctgtgctatcagtcaatttgaattacatttacgtacgctactcgatttgccaacgcctgaattacaaacgttcgccccaagtgtgatgattaatttaatcggcaccaatcataaccctaaatggcttaatacaccctttgcacagcttcattggtacggtaaagaagtgagaactgggcgtaaagttgggcatatcaatctttcccatcctaacaaagcggtcattattcaacaattagaaaaactccgcactgaattaccagaagattatcaatcaggattaaattgggcgattgaaaaactaaaataa

SEQ ID NO: 3378 - protein, 362 aa, Haemophilus influenzae
MQNSTLYPTVYVLGNGQLGRMLGYAGAPLDIYVEPLAFNAPVFDLPENAIITAEIERWEKTPLTELLGNHKNFVNQHVFGLLADRFTQKSLLDELNLSTSPWCLLKDKTQWNDVFQTVGEKVVVKRRTGGYDGHGQWIISDENKADITDDLFGEVIAEKFIPFDYEVSIVGTRFKNGEKRFYPVTHNLQQNGILRYSVVDSAFPQQSAQQKQAEAMLSKIMDKLGYVGVMAMECFVVGEKLLINELAPRVHNSGHWTQLGCAISQFELHLRTLLDLPTPELQTFAPSVMINLIGTNHNPKWLNTPFAQLHWYGKEVRTGRKVGHINLSHPNKAVIIQQLEKLRTELPEDYQSGLNWAIEKLK

SEQ ID NO: 3379 - DNA, 1191 bp, Haemophilus influenzae
atgtttgaacatattaaagcggcaccagccgatccaatcttaggcttaggcgaagcatttaaatccgaaactcgcgaaaataaaatcaatttgggtattggggtttataaagatgcacaaggcacaaccccgattatgcgtgcggtaaaagaagccgaaaaacgcttatttgataaggaaaaaacgaaaaattatctgactatcgatggtattgcggattataacgaacaaacaaaagcgttacttttcggtaaagattctgaagtaattaaatctaatcgtgcaagaacagtacaaagtttaggcggaacaggtgcattacgtatcgcagcagaatttattaaacgtcaaaccaaagcacaaaatgtttggatcagcacaccaacttggccaaaccacaatgcgattttcaatgcagtcggtatgaccattcgtgaatatcgttattatgatgctgaacgcaaagcccttgattgggaacacttattagaagatttaagccaagcaagcgaaggcgatgtagtgctgttacacggctgctgccacaacccaacgggtattgacccaacccctgaacaatggcaagaattagccgcactttcagctaaaaatggttggttgccactctttgactttgcttatcaaggtttagccaacggattagatgaagatgcttatggcttacgtgcttttgcggcaaaccacaaagaattattagtggcgagttcattctcgaaaaactttggtttatacaatgaacgtgttggtgcatttacccttgtggctgaaaatgcagaaattgcatcaaccgcattaacccaagtaaaatcaattattcgcaccctatactctaacccagcgtctcacggtggggcgaccgtagcaaccgtattaaatgatgctcaacttcgccaagaatgggaaaatgaattaactgaaatgcgtgaacgcatcaaaaaaatgcgtcatttattcgttcagttattaaaagaatatggtgcagaacaagatttcagctttatcattgaacaaaacggtatgttctctttcagtggattaacaggggaacaagtggatcgtttaaaaaatgaatttgccatttacgctgttcgttctggtcgtatcaatgtggctggtatcactgaagacaatattcgctatctatgtgaaagtatagtgaaagtactttaa

SEQ ID NO: 3380 - protein, 396 aa, Haemophilus influenzae
MFEHIKAAPADPILGLGEAFKSETRENKINLGIGVYKDAQGTTPIMRAVKEAEKRLFDKEKTKNYLTIDGIADYNEQTKALLFGKDSEVIKSNRARTVQSLGGTGALRIAAEFIKRQTKAQNVWISTPTWPNHNAIFNAVGMTIREYRYYDAERKALDWEHLLEDLSQASEGDVVLLHGCCHNPTGIDPTPEQWQELAALSAKNGWLPLFDFAYQGLANGLDEDAYGLRAFAANHKELLVASSFSKNFGLYNERVGAFTLVAENAEIASTALTQVKSIIRTLYSNPASHGGATVATVLNDAQLRQEWENELTEMRERIKKMRHLFVQLLKEYGAEQDFSFIIEQNGMFSFSGLTGEQVDRLKNEFAIYAVRSGRINVAGITEDNIRYLCESIVKVL

SEQ ID NO: 3381 - DNA, 618 bp, Haemophilus influenzae
atgttagctgtaaataatctttatatagaacgcaatggtagagcgattattcaagatttaagttttaccttggaaggtcaaaaacgtcttttcgtccaaggggaaattggctcaggaaaaaccactttactgcttgctttgttgggatttgttccagtaaccaagggggaaattaaactatttggcaaagtttgtcgtaaagaaaaagattttgcgccatttcgtggcacgattggtatttgttttcaaaatgccgatgatcaactttttggcccaacggtgttggatgatattgccttcgggccattaaaccaaaatattccaagagagcaggcgtatcatatcgcagagcagcaattagaacgtcttggtatcacaggtttaaaagatcgtatggtgcataccctatctggtggggaaaaaaatttcactgcacttgcgggtgtcttagcgatgcagccaaaaatcttattattagatgaacccaccaatggattagatcgaaaaaatactgaaaaattgaccgcacttttgcgagaactttccctacccattttgatttcatcccatcatcatggatttattaacgaattagccacagaaattatcagtttatga

SEQ ID NO: 3382 - protein, 205 aa, Haemophilus influenzae
MLAVNNLYIERNGRAIIQDLSFTLEGQKRLFVQGEIGSGKTTLLLALLGFVPVTKGEIKLFGKVCRKEKDFAPFRGTIGICFQNADDQLFGPTVLDDIAFGPLNQNIPREQAYHIAEQQLERLGITGLKDRMVHTLSGGEKNFTALAGVLAMQPKILLLDEPTNGLDRKNTEKLTALLRELSLPILISSHHHGFINELATEIISL

SEQ ID NO: 3383 - DNA, 633 bp, Haemophilus influenzae
atgaaaattcatcgcttatttcaaccgcactttaggttgatttacctatttatctgggggctaatcatcagtggattgagtgatctcacttggcttatcccccttaatgcgcttgcagtttctctcttttttatttcactgcagctcagtcaaaaatcttttttgccttaccttaaacgttggtttgctttaatcatttttattgctttaatgtgggcgacattaagttggcaaattggcgaaaatggcattgaactcaattttcaaggcatagaattagcagaaaaattgagtttgcgtactcatttattgttaatttctctttggctttttttatggaatattaatgatgcggtgcttgttcaagccattggtaaattgcctttgccagaaaaattaattcaactttttgtgctgaccgtacgttacattgcactgcttggagaattgcgtcaaaaaatggatattgccatgcactctcgtggatttcgtcgtgggcttaatcgccgaaccctttatgtgaccgctcaaagtgtcgctttattattgattcatgccctattaaaagccgaaacggcgcaaatggcgttaaaatgtcgtggttttcagttcggcaaaaagagagaaaaataa

SEQ ID NO: 3384 - protein, 210 aa, Haemophilus influenzae
MKIHRLFQPHFRLIYLFIWGLIISGLSDLTWLIPLNALAVSLFFISLQLSQKSFLPYLKRWFALIIFIALMWATLSWQIGENGIELNFQGIELAEKLSLRTHLLLISLWLFLWNINDAVLVQAIGKLPLPEKLIQLFVLTVRYIALLGELRQKMDIAMHSRGFRRGLNRRTLYVTAQSVALLLIHALLKAETAQMALKCRGFQFGKKREK

SEQ ID NO: 3385 - DNA, 621 bp, Haemophilus influenzae
atgcatttatctgaaggcgtgttacatacgcctattttattagctggtgcagtgcttgctgttgcgggcattgctgtggggttacgtcgtttagaatcagaacgtttatcgctcaccgcactttttgccgctgcattttttgtggctggaactattcatatacccgtaggaattggtagtgtgcatttaattttaaatggtatggctggtttattccttgggtgggctgtttttcctgcgtttcttatcgcacttttattgcaagtcatcttcttttcttttggcggatttgcagtgttaggcgtcaatctatgcgtgatggcaacgcctgcagtgattgctcattatcttttccgttctcgtttacaacctcacatggctttaaaagatcgcttattcgtcggtattggagctggcgtaattggcgttggcggggctggtgcacttgcttcttttgtgctgatgttagatggtggaaaaagttatctgaatcttgtttggctcttgctagtctctcatattccggtatttattttggatagtattatcagcgtaggagtgattaccttgcttggtaaaatgtatcctgaagtcatgaatcgtaccgagaatgtctcttaa

SEQ ID NO: 3386 - protein, 206 aa, Haemophilus influenzae
MHLSEGVLHTPILLAGAVLAVAGIAVGLRRLESERLSLTALFAAAFFVAGTIHIPVGIGSVHLILNGMAGLFLGWAVFPAFLIALLLQVIFFSFGGFAVLGVNLCVMATPAVIAHYLFRSRLQPHMALKDRLFVGIGAGVIGVGGAGALASFVLMLDGGKSYLNLVWLLLVSHIPVFILDSIISVGVITLLGKMYPEVMNRTENVS

SEQ ID NO: 3387 - DNA, 486 bp, Haemophilus influenzae
atgaagaaaattgttttttttatcgcactttttgcggcttgttatctcccgaatgcttatgcccacgcgctttatgtgtttgcccaatatgatgggcaaacactctctggcaaatcctattattctgatatgactcctgcagctgaaacttatttagaagttttccgctcaggcgtttctgatcctgttttaactggaaaaacagatcgccaaggcgcatttaagctttctattgctgatgtgccacatacaaccttaaaagttgtggtggaaggcgatgaaggacaccgtgcgtccgttgttgctgctcatacatctgccgaaaatcaaagcggtgcagatttaatgctgcttcgtgaagatattgcgcatttaaaagataaaatttatttgcatgatattttaggtggaatcggttatatcgttggtattgctggacttattgctttacgtaatgcgcataaaattaaacaaggacgtatttaa

SEQ ID NO: 3388 - protein, 161 aa, Haemophilus influenzae
MKKIVFFIALFAACYLPNAYAHALYVFAQYDGQTLSGKSYYSDMTPAAETYLEVFRSGVSDPVLTGKTDRQGAFKLSIADVPHTTLKVVVEGDEGHRASVVAAHTSAENQSGADLMLLREDIAHLKDKIYLHDILGGIGYIVGIAGLIALRNAHKIKQGRI

SEQ ID NO: 3389 - DNA, 684 bp, Haemophilus influenzae
atggaattaaaaaaaatcgccgtgggattaaccgcacttttaggtgtgtctgttgctaacgctcacaatgtttggcttgaacctacttcatcacaagatgaatacgtagtgaaatttggacatgaacaaactgaaacctatccagaatctaaacttaaatctatccaagccttaaatgcgcaaggaaaattaactgccgttgattaccaattcagaaatggcgaagcctatcttatgcctaaatctgatttagtattcgttcatttcgataatggtgtatggtcaaaactaccaagcggtaaatacgttgaaaaaacaaaacgtgaagaaccaactgctgaatttagtaccaatcctgttaaatttggtaaagcgattttgaaatgggatgctgaatctttcaaatctcatcaacaagcttacgaattgattcctcaagaaaaagcacaagcgaacaaaccactttctatccttgtgttacataacggtaaacccgttcaagggattaaagtaggtgtaagtgaagatgcaccgttcaatttaactaatgaaaaaggtatcgctcaatttacgccaactaaaggtttcaacaaagtctgggcagagtttgaggaaaacgtaacaaataatgcagattacgatcgtcgctctgtagaatatatgctaacttttgacgcacaataa

SEQ ID NO: 3390 - protein, 227 aa, Haemophilus influenzae
MELKKIAVGLTALLGVSVANAHNVWLEPTSSQDEYVVKFGHEQTETYPESKLKSIQALNAQGKLTAVDYQFRNGEAYLMPKSDLVFVHFDNGVWSKLPSGKYVEKTKREEPTAEFSTNPVKFGKAILKWDAESFKSHQQAYELIPQEKAQANKPLSILVLHNGKPVQGIKVGVSEDAPFNLTNEKGIAQFTPTKGFNKVWAEFEENVTNNADYDRRSVEYMLTFDAQ

SEQ ID NO: 3391 - DNA, 534 bp, Haemophilus influenzae
gtgcggttaatcccacggcgattttttttaattccattttggatgctccttgtttgtttaagaaaatctaggcgtatgataaaatatgaagtaactttagaatcaagtcattttttaaggaaattgatgaaaattggagcgcttgctaaagccctaggctgtaccgtagaaaccattcgttattatgaacaacagggtttaatcccgcccccaaaacgcacttcaggcaattttcgccaatataatgaagaacatttgcaacgtttatcatttatttgtaactgccgaaatttagatatttcattaaatgaaataaaaagcctactgaatttagaaaacgcctccaaacaacaagcagaagaaataaatcgtgtattagacaaacacattaaagaggtggcgacaaggattcacgaactcgcccatttacggatgaaattaattgaattacgtgagaaagcagtctcgaatgatgaagatccaatgaaattgctattgcaacatagtggcgtgaaatttgtgcgattaaaataa

SEQ ID NO: 3392 - protein, 177 aa, Haemophilus influenzae
MRLIPRRFFLIPFWMLLVCLRKSRRMIKYEVTLESSHFLRKLMKIGALAKALGCTVETIRYYEQQGLIPPPKRTSGNFRQYNEEHLQRLSFICNCRNLDISLNEIKSLLNLENASKQQAEEINRVLDKHIKEVATRIHELAHLRMKLIELREKAVSNDEDPMKLLLQHSGVKFVRLK

SEQ ID NO: 3393 - DNA, 543 bp, Haemophilus influenzae
atgaaactgaagttattttttcatatagtattactttgttttagtttgcctatttgggcaatgaaaaccgttgatgttacagcgagtccgaaaatggatgatcaagcaagaatgaatttggcacaagagtttgccaataaacaacaatggatcgacgttttcaatattatgtatccaatggcgttagaaggaaatataacggctcaaagcaatttaggtatgttatataaccttgggcgtggcacggtgagagactatgaaaaggcttattggtggtttagcgaagcggcagagaagggcagcgtgaaagggctaaataatcttggcgttatgtatctgcgtggcgattacgtcaaacaaaatacagagcaggccattaagctttttgaacgtacagctcgagctaaagatacggatgcgatgatgatgttaagtaatatttatctctcacaaaaccagcctaaaaaatccttagaatggttgaaaaaagctgctgaattaggtaatcaggaagcaaaacagcgtttatctagccagccataa

SEQ ID NO: 3394 - protein, 180 aa, Haemophilus influenzae
MKLKLFFHIVLLCFSLPIWAMKTVDVTASPKMDDQARMNLAQEFANKQQWIDVFNIMYPMALEGNITAQSNLGMLYNLGRGTVRDYEKAYWWFSEAAEKGSVKGLNNLGVMYLRGDYVKQNTEQAIKLFERTARAKDTDAMMMLSNIYLSQNQPKKSLEWLKKAAELGNQEAKQRLSSQP

SEQ ID NO: 3395 - DNA, 717 bp, Haemophilus influenzae
atgaaactgcttatttctaatcagcacggtgctattgttatggcattggtgccttttatttatggtatgttgcttgctaatccagtatgggcacacttatttttattattaggatggttttcgctttatttgatgacttatccttttttgaatttgtttaaaggtaaaaatcttgagttatataaaaaatggtctgtgatttattttgctgccgccgtgatttttgcgattcccgcgttaatttataattggcaagtgttgtattttatgtttgccatgttaccgtttgttgcggtgaatatttatttcaccaagaaaaaagatgagcgcaatttatggaatgacttggcagggatcttaatttttgctctagctggaatgggatcctattacttttctgaccgcacttttgatgaaaaaatactttgggtggcgatttatccaacattattttttattggaacaacactttatgtaaaatcaatgatgcgtgaacgaaaaaatccacgttatttttgggcatcagtgatttttcacttattatgtgcgctgatttttgtggtttcgcaacaatttattttagcattagcttttgtgcctggattagtgcgagccgtttatttgcccactaaaaagctttctgttatgcaagttggactaatcgaatttgcgattactgccgtgttttttattttacttttagtagcaaccttgtaa

SEQ ID NO: 3396 - protein, 238 aa, Haemophilus influenzae
MKLLISNQHGAIVMALVPFIYGMLLANPVWAHLFLLLGWFSLYLMTYPFLNLFKGKNLELYKKWSVIYFAAAVIFAIPALIYNWQVLYFMFAMLPFVAVNIYFTKKKDERNLWNDLAGILIFALAGMGSYYFSDRTFDEKILWVAIYPTLFFIGTTLYVKSMMRERKNPRYFWASVIFHLLCALIFVVSQQFILALAFVPGLVRAVYLPTKKLSVMQVGLIEFAITAVFFILLLVATL

SEQ ID NO: 3397 - DNA, 351 bp, Haemophilus influenzae
atgacaattcaacgcattttacccagtgcacgtttaagtgaagtttcaattcataacaacctcgcctattttgcagggcaagttccagaattaactatcgagcaaaatgcctacgaacaaaccaaagaagtattaggtttaattgataaattgttagcagaaattggctccaataaaagcaacattttaaccgcgcaaattttcttagctgatatgaaagattatgcacaattaaatcaagcttggggtgaatgggtcgatcatgttagcccaccaagtcgagcgacagtggaagctaaattagcggatcctcgttggaaagttgaaattgttattattgcaacttgttag

SEQ ID NO: 3398 - protein, 116 aa, Haemophilus influenzae
MTIQRILPSARLSEVSIHNNLAYFAGQVPELTIEQNAYEQTKEVLGLIDKLLAEIGSNKSNILTAQIFLADMKDYAQLNQAWGEWVDHVSPPSRATVEAKLADPRWKVEIVIIATC

SEQ ID NO: 3399 - DNA, 405 bp, Haemophilus influenzae
atggaaaatttgaccaatgaaatttgggtagcaattggtatcgcttttattgttggattatttattggttacattattgtgcgtttaaccaaaggctccgtaaaacatcaagctaaaacagaagctgaattaaaaacagttaaaacccaacttgatacacaaaaggcgcaaatcgaaaaacatttcgcagaaagtgctgagttattcaaaaccttaattaacgattatcaaaaactttatcgccactacgcaacctcttccaataacttactgggcgaaaaagatcaaaaaggtttatttacccaacagttaattactacaacagataaatctcaaaatgaacagcctagagattattcggagggtgcatcaggcttatttaaagaaaataaagaagaaaattaa

SEQ ID NO: 3400 - protein, 134 aa, Haemophilus influenzae
MENLTNEIWVAIGIAFIVGLFIGYIIVRLTKGSVKHQAKTEAELKTVKTQLDTQKAQIEKHFAESAELFKTLINDYQKLYRHYATSSNNLLGEKDQKGLFTQQLITTTDKSQNEQPRDYSEGASGLFKENKEEN

SEQ ID NO: 3401 - DNA, 606 bp, Haemophilus influenzae
atggaatttttaattggattttttactgaatatggttattgggctgttctttttgttttaattatttgtggatttggtgtacctattccagaagatataacattagtttcaggtggtgtcattgctgggctttatccagaaaatgtcaattctcatttgatgttgctggttagtatgattggtgtgcttgctggcgattcctgtatgtattggcttggtcgaatttatggcacgaaaattttacgtttccgaccaatacgtagaatcgtaacattacagcgtttaagaatggtgcgtgaaaaattcagtcaatatggcaatcgagtactgtttgttgcacgatttttacccggtttacgtgctccaatttatatggtatcaggtattacacgccgtgtaagttatgttcgttttgttttaatagatttctgtgctgcgattatttctgtacctatttggatttatcttggggaattgggggctaaaaatttagattggctacatacacaaattcaaaaaggtcaaattgtgatttatatatttattgggttacttgtactattctttttttggaaatggaaaaaatctaaaaaatcaacgcaataa

SEQ ID NO: 3402 - protein, 201 aa, Haemophilus influenzae
MEFLIGFFTEYGYWAVLFVLIICGFGVPIPEDITLVSGGVIAGLYPENVNSHLMLLVSMIGVLAGDSCMYWLGRIYGTKILRFRPIRRIVTLQRLRMVREKFSQYGNRVLFVARFLPGLRAPIYMVSGITRRVSYVRFVLIDFCAAIISVPIWIYLGELGAKNLDWLHTQIQKGQIVIYIFIGLLVLFFFWKWKKSKKSTQ

SEQ ID NO: 3403 - DNA, 288 bp, Haemophilus influenzae
atggcatttaaatttaacgctgaagttcgtacagcgcaaggtaagggtgcgagccgccgcctgcgtcacaatggtcaaattcctgcaatcgtttatggtggcagcgaagagccagtttcaatcatcttaaaccacgatgaattaaacaacgcgcaagcacatgaatctttctattctgaagtgatcactttagtagtagatggtaaagaagttgcagttaaagtacaagcaatgcaacgtcacccattcaaaccaaaattggttcacattgacttcaaacgtgcataa

SEQ ID NO: 3404 - protein, 95 aa, Haemophilus influenzae
MAFKFNAEVRTAQGKGASRRLRHNGQIPAIVYGGSEEPVSIILNHDELNNAQAHESFYSEVITLVVDGKEVAVKVQAMQRHPFKPKLVHIDFKRA

SEQ ID NO: 3405 - DNA, 366 bp, Haemophilus influenzae
atgccccagctctcagccgccaaatttggcggaacatctgttactaactacgattcgatgacagcttgtgcaaaaattgtcattgccgatcccaatacacgcgtagttgtgctttctgcatcagctggtgtaacaaatttattagtagctttagcaaatggtgtaaaagcgacagaacgtgaaaaattaattggtaatgatctgcatattacttcaggtgtggcaaaacgtatttttgatactgttcaatcttataatgtgcgaatgattagttatggggcaagtaccaacaatgtttgtatgttagtacaaagtgaacattctgatgaaattgtacgctcgttacacaaatccttatttgaataa

SEQ ID NO: 3406 - protein, 121 aa, Haemophilus influenzae
MPQLSAAKFGGTSVTNYDSMTACAKIVIADPNTRVVVLSASAGVTNLLVALANGVKATEREKLIGNDLHITSGVAKRIFDTVQSYNVRMISYGASTNNVCMLVQSEHSDEIVRSLHKSLFE

SEQ ID NO: 3407 - DNA, 1299 bp, Haemophilus influenzae
atgggaaaaagcgttgttatcttaggcgcacaatggggcgatgaaggtaaaggaaaaatcgttgatcttttgacggatcgcgtaaaatacgtagttcgttatcaaggcggtcataacgcaggtcacacacttattatcaatggtgaaaaaaccgtattacgtttaattccatctggtatgttacatccaaacgtaacttgcttaattggtaatggcgttgtggtttcgcctgaagcattaatgaaagaaatgggcgaacttgaaagccgaggtattaaagttcgtgaacgtttattaatttcagaagcttgtcctttgattctgccttatcacgttgcaatggatcacgcacgcgaagcagcccttggcaaaaaagctatcggtacgactggtcgtggtattggcccagcttatgaagataaagtagctcgtcgtggtttacgcgtaggcgatttatttaataaagaagcctttgccgaaaaactcaaaaacatccttgaatactataatttccaattggtgaactactacaaagttgaacctgtcgattatcaaaaaaccttagatgatgtaatggcaattgccgatgtaatcacaagtatggtggcagatatcactacaattcttgatactgcgcgcaaaaatggcgaacatattttatttgaaggcgcacaagggacaatgttagatatcgaccacggtacttatccgtatgtaaccagctcaaacacaacggctggtggtgttgcaacaggttctggttttggcccgcgtaatcttgattatgtacttggtatcattaaggcttactgtactcgtgtaggtggtggcccattcacaactgaattatttgatgatgtgggtgctgaaattgctcgtaaaggtaacgaatttggcgcggtaacaggtcgtccacgtcgttgcggttggtttgatgccgtcgccattcgccgtgcaatccaacttaactctatttctggtttctgtatgactaaactagacgtattagatggttttgatgaagtaaaaatctgtgttgcttacaaaatgccaaatggcgaaatcgttgaatatgcaccgttagcggcgaaagattgggatggtgtagaaccaatttatgaaacattacctggctggaaagaaaatactttccgcgtcacagatgtaaataaattgccacaaaactgtattaactatattaaacgtattgaagaagtgactggcgtacctattgatattctttcaactggccctgatcgtgtagaaaccatgattttacgtgatccgttcgcagcttaa

SEQ ID NO: 3408 - protein, 432 aa, Haemophilus influenzae
MGKSVVILGAQWGDEGKGKIVDLLTDRVKYVVRYQGGHNAGHTLIINGEKTVLRLIPSGMLHPNVTCLIGNGVVVSPEALMKEMGELESRGIKVRERLLISEACPLILPYHVAMDHAREAALGKKAIGTTGRGIGPAYEDKVARRGLRVGDLFNKEAFAEKLKNILEYYNFQLVNYYKVEPVDYQKTLDDVMAIADVITSMVADITTILDTARKNGEHILFEGAQGTMLDIDHGTYPYVTSSNTTAGGVATGSGFGPRNLDYVLGIIKAYCTRVGGGPFTTELFDDVGAEIARKGNEFGAVTGRPRRCGWFDAVAIRRAIQLNSISGFCMTKLDVLDGFDEVKICVAYKMPNGEIVEYAPLAAKDWDGVEPIYETLPGWKENTFRVTDVNKLPQNCINYIKRIEEVTGVPIDILSTGPDRVETMILRDPFAA

SEQ ID NO: 3409 - DNA, 828 bp, Haemophilus influenzae
atgtcaaatttacaagcaattattgaagcggcatttgaaaaacgtgcagaaattacaccaaaaaccgttgatgcagaaacgcgcgcggcaattgaagaagtgatcgaaggattagattctggaaaatatcgtgtagccgaaaaaattgatggcgaatgggtaacacatcaatggttaaaaaaagcggtattgctatctttccgcattaacgataaccaaatcattgatggtgcagaaacaaaatattacgacaaagtggcattaaaatttgcggattataccgaagaacgttttgctgaagaaagtttccgtgttgtgccttctgcaacggtgcgtaaaggtgcatacatttctaaaaactgcgtattaatgccatcttatgtaaacattggtgcttacgttggcgaaggcaccatggtagatacttgggcgacggttggttcatgcgcacaaattggtaaaaacgtgcatttatcgggtggtgtaggaatcggcggcgtgttagaaccattacaagctaacccaactattattggcgataactgttttattggcgctcgttcagaagtggttgagggtgttatcgttgaagatggttgtgttatttcaatgggcgtattcattggtcaatcaaccaaaatttatgatcgtgaaacaggcgaaattcattacggccgtgtaccagcaggttctgtggtggtatcaggtagccttccatcaaaatgtggaaaatacagcttatactgcgccgtgatcgtgaaaaaagtggatgcaaaaactttaggtaaagtaggcattaacgaattattacgttctatcgaagaatag

SEQ ID NO: 3410 - protein, 275 aa, Haemophilus influenzae
MSNLQAIIEAAFEKRAEITPKTVDAETRAAIEEVIEGLDSGKYRVAEKIDGEWVTHQWLKKAVLLSFRINDNQIIDGAETKYYDKVALKFADYTEERFAEESFRVVPSATVRKGAYISKNCVLMPSYVNIGAYVGEGTMVDTWATVGSCAQIGKNVHLSGGVGIGGVLEPLQANPTIIGDNCFIGARSEVVEGVIVEDGCVISMGVFIGQSTKIYDRETGEIHYGRVPAGSVVVSGSLPSKCGKYSLYCAVIVKKVDAKTLGKVGINELLRSIEE

SEQ ID NO: 3411 - DNA, 1011 bp, Haemophilus influenzae
atggcaacaattaaagatgtggcaaaaatggctggtgtgtccaccacaaccgtatctcacgtaattaataaaacccgtttcgttgcaaaagatacggaagaagcggtgttatccgcaattaaacaacttaattattcccctagtgctgtggcacgcagtttaaaagtcaataccaccaaatccattggtatgattgtgacaaccagtgaagcaccgtattttgccgaaatcattcattctgttgaagaacattgctatcgacaaggttattctttatttttgtgtaacacacaaaatgatcctgaaaaagtcaaaaatcatttagaaatgttagcaaaaaaacgggttgatggcttgcttgtaatgtgttctgaatatacgcaagattcattggatttactttcatcattttccactattccaatggttgtaatggattggggcccaaatgctaataccgatgtgattgatgatcatagttttgatggcggatatttagcaaccaaacacctcattgagtgcggtcataaaaaaatcgggattatctgcggcgaactcaataaaactaccgcaagaacgcgttatgaaggctttgtaaaagcaatggaagaagctaaattaaccatcaatccgtcttgggtactagaaggtgcatttgagcctgaagatggttatgaatgtatgaatcgtttactgactcaagaggaattaccaactgccctattctgttgtaacgatgtgatggcgttaggtgcaatttccgctctgacagaaaaagacttacgcgtgccagaggatatgtccattatcggctatgatgatattcacgcctcacgtttctacgcaccaccattaaccaccattcatcaatcaaaactacgtttaggcagacaggcagtaaatattctgttagaacgaattagtcacaaagatgaaagcgttcaacaatatggtcgtattgatatagcccctgagcttatcattcgaaaatccgttaaatcgattttataa

SEQ ID NO: 3412 - protein, 336 aa, Haemophilus influenzae
MATIKDVAKMAGVSTTTVSHVINKTRFVAKDTEEAVLSAIKQLNYSPSAVARSLKVNTTKSIGMIVTTSEAPYFAEIIHSVEEHCYRQGYSLFLCNTQNDPEKVKNHLEMLAKKRVDGLLVMCSEYTQDSLDLLSSFSTIPMVVMDWGPNANTDVIDDHSFDGGYLATKHLIECGHKKIGIICGELNKTTARTRYEGFVKAMEEAKLTINPSWVLEGAFEPEDGYECMNRLLTQEELPTALFCCNDVMALGAISALTEKDLRVPEDMSIIGYDDIHASRFYAPPLTTIHQSKLRLGRQAVNILLERISHKDESVQQYGRIDIAPELIIRKSVKSIL

SEQ ID NO: 3413 - DNA, 2640 bp, Haemophilus influenzae
atgacacaagagtacagtactcttcgtaataacattagtatgttagggcgttttctcggagaaacaatcaacgatgcccaaggtaccgatattctcgagttaatcgaaaacattcgtaaactttctcgcaattctcgtgctggcgatgataaagcaagacaagcattgctcgatacgctaggtagtatttctaatgaaaatattattcctgttgcacgtgctttcagccaatttttaaacctcacaaacattgctgaacaatatcaaacaatttcccgtgaacattctcttgctcaaagttcttctcaatccttaagcgaacttttcaaacgtttaaaagaacaaaatgcctctgtggaagatgttcataaaaccgtcgaaaaattattaattgagcttgttctgaccgcacatccaacagaaacaacacgtcgttcattaattcataaacacattgaaatcaataaatgtttaagcaaattagagcataatgatttaacggaaaaagaacgcaatattattgagcgtctattacttcgtttaattgcagaggcgtggcataccaacgaaattcgtactgttcgtccaacaccatttgatgaagtaaaatggggctttgcgatgttggaaaacagtttgtggcaagctgtaccagaatttttacgccaactaaatgaaaccgcccgtgaatttttaggttacgatttgccagtgggattaaaacccgtacgcatttcctcttggatgggcggcgaccgtgatggaaacccatttgttacggcacaaatcacaaagaaagtactttattttgcccgttggaaagcggcggatttattcttacaagacatcagcaaattagccgatgaactttcaatgatgagatgtagcgatgaatttcgtgttaaatacggtaaccatttagaaccctatcgtttcgtagtaaaaaatttacgcgatcagcttacagcaacattagcttattttgatgatcacttatcaaatcgcacaccgcgcgtatctgaaagcgaaattattttagaagataatcaactttgggaaccgctttacgattgttatcaatctttaattcaatgcggtatgcgcattattgcaaatggttcattgttggatattttgcaccgtattagttgttttggcgtgacactttctcaaatggatattcgccaagaaagcactcgtcacaccgatgccattgctgaaatcacgcgctatattggtttgggcgattactctcaatggacggaagacgataaacaggctttcttaattcgggaattaagctcacgccgtccattaattccgcaaaactggacgccatcgcctgaaacccaagaaattttagatacttgcaaagtcattgctcaacaaaaacaaggtgttatagcttgttatgttatttcgatggcgcgcagtgcatctgatgttttagccgttcatttactcttaaaagaagctggcgtgccatatcatattcctgttgtgccattattcgaaaccttagaggatttagatgcagccgaaaaagtgatgactcaacttttcaatgtgggttggtatcgtggcgtgatcaataatcgtcaaatggtaatgattggctattcagattcggcaaaagatgcgggaatgatggcagcctcttgggcgcaataccgtgcgcaagaagccttagtgaatttaacagaaaaacttggcattgaacttactttattccacggacgtggtggcacaattggtcgtggcggtgcgccagcacatgcggcattactttctcagccacctcgttccttaaaaaatggtttacgtgtaacagaacaaggcgaaatgattcgtttcaaactgggtttacccgcagtagcagtagaaacctttgatctttacgccagcgccattttagaagcaaatcttttaccgccaccagaaccaaaaccagaatggcgtactataatggacgagctttccacgatttcttgcgatatttatcgtggtgtggtgcgtggcgataaagattttgtgccttatttccgcagtgcgacgccagaacaggagctctccaaattgccgcttggctctcgccctgcaaaacgcaatccaaatggcggcgtggaaagtttacgtgcgatcccgtggatttttgcttggatgcaaaaccgtttaatgctgccagcttggctaggcgctggtgcagctattcgtcaagttattgaacaaggcaaaggcgatattattcataaaatgtgcgaaaactggccgttcttttcaacgcgaatcggaatgttggaaatggtctttagtaaatcggatacttggctttcccaacaatatgatcaacgattagtgaaaaaagagctttggtatttaggcgaaaatttacgtaagcaacttgaagatgatattcaaactgtgctttcactttctcaccaaagtaaattgatgtctgatttaccttggattgcagattcaattgcattacgtaatatctacacggatcccctcaatctactgcaagtggaattgctccaccgtttccgtgaaaatccagagcaagtcaatcccgatgtggaacaagcattgatgattaccatcacaggtatcgcggctgggatgcgcaatacgggctag

SEQ ID NO: 3414 - protein, 879 aa, Haemophilus influenzae
MTQEYSTLRNNISMLGRFLGETINDAQGTDILELIENIRKLSRNSRAGDDKARQALLDTLGSISNENIIPVARAFSQFLNLTNIAEQYQTISREHSLAQSSSQSLSELFKRLKEQNASVEDVHKTVEKLLIELVLTAHPTETTRRSLIHKHIEINKCLSKLEHNDLTEKERNIIERLLLRLIAEAWHTNEIRTVRPTPFDEVKWGFAMLENSLWQAVPEFLRQLNETAREFLGYDLPVGLKPVRISSWMGGDRDGNPFVTAQITKKVLYFARWKAADLFLQDISKLADELSMMRCSDEFRVKYGNHLEPYRFVVKNLRDQLTATLAYFDDHLSNRTPRVSESEIILEDNQLWEPLYDCYQSLIQCGMRIIANGSLLDILHRISCFGVTLSQMDIRQESTRHTDAIAEITRYIGLGDYSQWTEDDKQAFLIRELSSRRPLIPQNWTPSPETQEILDTCKVIAQQKQGVIACYVISMARSASDVLAVHLLLKEAGVPYHIPVVPLFETLEDLDAAEKVMTQLFNVGWYRGVINNRQMVMIGYSDSAKDAGMMAASWAQYRAQEALVNLTEKLGIELTLFHGRGGTIGRGGAPAHAALLSQPPRSLKNGLRVTEQGEMIRFKLGLPAVAVETFDLYASAILEANLLPPPEPKPEWRTIMDELSTISCDIYRGVVRGDKDFVPYFRSATPEQELSKLPLGSRPAKRNPNGGVESLRAIPWIFAWMQNRLMLPAWLGAGAAIRQVIEQGKGDIIHKMCENWPFFSTRIGMLEMVFSKSDTWLSQQYDQRLVKKELWYLGENLRKQLEDDIQTVLSLSHQSKLMSDLPWIADSIALRNIYTDPLNLLQVELLHRFRENPEQVNPDVEQALMITITGIAAGMRNTG

SEQ ID NO: 3415 - DNA, 1413 bp, Haemophilus influenzae
atgtttaatcgggttcaaaaggaaatcaatcaaattattaatcgtggttttgaccgcactttgcgcttggcggtgacggggttaagtcggagtggaaaaacggcgtttattacaagtttaatcaatcaacttctctccattaatcaacattcatcacagaatttgcccttgtttgaagcagctagaaatggtgcgatcttggcagtcaaacgagtatcccaacaagatctcagcgtgccacgttttgattatgaaagtaatttaaatgatttgtcacaaaatccgcctcaatggtttcaatctactcgtggcgtgagtgaaacgcgtttagcaattcgttttcaacgtcaatctggcttgctacgccatttgaaagaacgcggcacgctttatctggatatttttgattatccgggagaatggctgctcgatttgccgttattaaatctagattttcaacaatggtcacaagagcaaattaaggtaacaacaggcattcgtgaagaattggcgcaaaattggctttccatgttgcagaatttggatttaagtgcggtcgcaaatgaagatgttttagccaagattgcgaaaagttatacggattatttacaccaatgtaagtcgcaaggcatgcaatttattcagcctgggcgatttgtattgccaagtgatttagagggtgcgcccgcattacaattttttccattaattcatctttcggaagaacattggcaaaccttgaaaaaaacagccaaatcgaatagctattttgccgtgctgacaaaacgttataattattatcgcaataaaattgtgaaaggtttttacgaaaattatttttctacctttgatcgtcaagttattttggcggattgtttaacgcctttaaatcacagtcagcaagcctttttagatatgcaaatgggcttaaatcagttatttaataatttccattatggcagcagaaattttcttcatcgtttgttttctccgcaaattgatcgattaatgtttgttgcgaccaaggcggatcatattactcgtgatcaaattcctaatttaatgagtttaatgcgccaaattgtgcaagagggcggtcgccatgtagaatttgaaggaattgatacggaatataccgccattgcggctgttcgtaccacaaaacaagtgatcgtgaatcagcaaggaaaagaaatgaaagcaattcaagggattcgttctattgataaacaaccgattacgctttatccaggaacggtgccaagtaaattaccaagagcagaattttggcaaaaacaaccgcactttgatttcgatagttttgaacctcagcctttagaacaaggggagagcattcctcatttgagaatggatgcggttttacaatttttattaagtgatcgatttgaataa

SEQ ID NO: 3416 - protein, 470 aa, Haemophilus influenzae
MFNRVQKEINQIINRGFDRTLRLAVTGLSRSGKTAFITSLINQLLSINQHSSQNLPLFEAARNGAILAVKRVSQQDLSVPRFDYESNLNDLSQNPPQWFQSTRGVSETRLAIRFQRQSGLLRHLKERGTLYLDIFDYPGEWLLDLPLLNLDFQQWSQEQIKVTTGIREELAQNWLSMLQNLDLSAVANEDVLAKIAKSYTDYLHQCKSQGMQFIQPGRFVLPSDLEGAPALQFFPLIHLSEEHWQTLKKTAKSNSYFAVLTKRYNYYRNKIVKGFYENYFSTFDRQVILADCLTPLNHSQQAFLDMQMGLNQLFNNFHYGSRNFLHRLFSPQIDRLMFVATKADHITRDQIPNLMSLMRQIVQEGGRHVEFEGIDTEYTAIAAVRTTKQVIVNQQGKEMKAIQGIRSIDKQPITLYPGTVPSKLPRAEFWQKQPHFDFDSFEPQPLEQGESIPHLRMDAVLQFLLSDRFE

SEQ ID NO: 3417 - DNA, 1524 bp, Haemophilus influenzae
atgaatgtggtcacggaacaaatttataacaaattatttgatataaaaaatcacagtgcaacattaacaccaatgctggcacaatcttattccatttcagctgatggtaaaaaaattttattaaatttacgtcacggcgtaaaatttcaccaaaccccttggtttaccccaacacgtgattttaacgctgaagacgtagtattttcgattaatcgtgtattaggacataatacttatttaccaaccttagcagagacgaatgttacctatagtaatccacaatatagagtgtttcacgaacaagcaagaaaagtgcgttttccttattttgatagcattaaacttaacgaaaaaatcaaatctgtgaccgcactttcgccttatcaagtaaaaattgaattatttgagccagattcctccattttgtcgcatcttgccagccagtatgccattattttttcacaagaatatgcctatcaattaagcgcagatgacaaccttactcaattagatacccacccagtaggcacagggccttatcaagtaaaagattatgtatataaccaatatgttcgcttagtgcgtaacgaaaactattggaaaaaagaagcaaaaattcaaaatattatcgtggatttatctactgatagaaacgggcgactcgtcaaatttttcaataatgaatgtcaaatagcctcttatcctgaagtgagccaaattggcttattaaagagcaacgataagcactactatatgcaatccactgacggaatgaatttggcatatcttgccttcaattttgaaaagccattgatgcaggatcgcaccattcgagaagctatctcacaaagtttgaaccgcgcacgtattattcacaacatctatcacaatactgcgacagtggcgaataacattattcctgaagtatcttgggcttcaagtgtcaatacgccagaatttgagtttgattacaatcccaaaatcgccaaaaataaattagcagataaaaaccttttgttaaatttatgggtaattaatgaagaacaagtctataatcctgcaccttttaaaatggctgaaatgataaaatgggatttagctcaagcgggtgtgaaagttaaagtgcgtgccgtaactcgtccatttttaactgcgcaattacgcaatcaatcggaaaattatgatttgattctatctggttggttagctggtaatcttgatcctgatggttttatgcgtccaattttaagctgtggaacaaaaaatgaactcactaatttatctaattggtgtaatgaagaatttgatcaatttatggatcgtgccattaccacctcacatttaagttcacgcgcaaaatcctataatgaagcccaagaactcgttttacgtgaattacccattattcctattgccaatgtaaaacgaattttagtcgcaaatagtcgtgtgaaaggagtaaaaatgacaccttttggtagcttagatttttccaccttgtattttattcaggagaaacactaa

SEQ ID NO: 3418 - protein, 507 aa, Haemophilus influenzae
MNVVTEQIYNKLFDIKNHSATLTPMLAQSYSISADGKKILLNLRHGVKFHQTPWFTPTRDFNAEDVVFSINRVLGHNTYLPTLAETNVTYSNPQYRVFHEQARKVRFPYFDSIKLNEKIKSVTALSPYQVKIELFEPDSSILSHLASQYAIIFSQEYAYQLSADDNLTQLDTHPVGTGPYQVKDYVYNQYVRLVRNENYWKKEAKIQNIIVDLSTDRNGRLVKFFNNECQIASYPEVSQIGLLKSNDKHYYMQSTDGMNLAYLAFNFEKPLMQDRTIREAISQSLNRARIIHNIYHNTATVANNIIPEVSWASSVNTPEFEFDYNPKIAKNKLADKNLLLNLWVINEEQVYNPAPFKMAEMIKWDLAQAGVKVKVRAVTRPFLTAQLRNQSENYDLILSGWLAGNLDPDGFMRPILSCGTKNELTNLSNWCNEEFDQFMDRAITTSHLSSRAKSYNEAQELVLRELPIIPIANVKRILVANSRVKGVKMTPFGSLDFSTLYFIQEKH

SEQ ID NO: 3419 - DNA, 966 bp, Haemophilus influenzae
atgttatggtcggttcttcgccatattctgtgggtggcattattattactcgtattatcgctattaggctttgtcattttattgcgcgatcctcttaatgcgaatcttgttacacaaaacatttatatcggctatttccattatttaggcaccttgttacaaggtgattttggcattacctataacggtggaaaatcattaatgaaccttattcttacggttcttcctcccacattggaactttgtttcattacattgtttttggcatttatttttggtttgccacttggcattataagtgcggtcaattctgaacaagtttttgcaaaaagtttacagagcttatcttatgtagggctatctattccaatattttggttagcccctattttactgtatgttgccgcgctctcacattgggaaattgccgctattggacaatataatttgctttacgaaattaaatccattacgggatttcctgttattgatatgtggtttatggaagtaccttatcgtacaaaaatcgtacaaaacatattgcaacatttagccttaccaacattggtattgtgtattttgccaacaatggaaattatccgcattattcatcaacgagcagaatatattttgaatcaaaatttttctaaagtagcgacaacacggggttggtcaaaatggaaaattctccatcaatacgtattccgtaatacttttcccctgcttgttccacaagtaccacgtgtattcacattagtattaacgcaatgtatgttggtagaaacggctttaggttggcctggcattggtcgttggttaattaatgccgtaaatgaacaagattacaacagcattgccgcaggtgtaattgttattggtgtatgtattattttgattgatacattcactaaaatattcacttttatactcgatccatttaaaaagaaaggttggtatgcaaaataa

SEQ ID NO: 3420 - protein, 321 aa, Haemophilus influenzae
MLWSVLRHILWVALLLLVLSLLGFVILLRDPLNANLVTQNIYIGYFHYLGTLLQGDFGITYNGGKSLMNLILTVLPPTLELCFITLFLAFIFGLPLGIISAVNSEQVFAKSLQSLSYVGLSIPIFWLAPILLYVAALSHWEIAAIGQYNLLYEIKSITGFPVIDMWFMEVPYRTKIVQNILQHLALPTLVLCILPTMEIIRIIHQRAEYILNQNFSKVATTRGWSKWKILHQYVFRNTFPLLVPQVPRVFTLVLTQCMLVETALGWPGIGRWLINAVNEQDYNSIAAGVIVIGVCIILIDTFTKIFTFILDPFKKKGWYAK

SEQ ID NO: 3421 - DNA, 888 bp, Haemophilus influenzae
atgcaaaataaagaacctgatgaattccgcgaaagcacctcaatctttcaaatttggttacgctttcgtcaaaataccatcgcactttttagcttttatttattaatcgcattaatttttaccgcactttttgctagttatcttgcaccttatgctgataatcgacaatttattgggcaagaattaatgcctccttcttgggtagatagaggaaaaattgcttttttctttggtactgatgatttaggtcgcgacatattaagtcgtttaattatgggtactcgttataccttaggttctgctttactggttgtcttttcagtggcaataataggcggcgcactaggaattattgcaggactactgaaaggtattaaagctcgttttgtcgggcatatttttgatgcttttttatcgttacctattctattaattgccattgttatttcaacattaatggaaccaagtttatggaatgcaatgttcgcaacactcttagcgatattgccgtatttcatccatgcaatttatcaagccattcaacaagaattgaaaaaagattatgtgctgatgttaaaacttgaaggcatttctaactgggaattattaaaaagcactattttaccgaatattactattatttatattcaagaagtggctcgtgcttttgttatagccgtgttggatattagcgccttgagttttatttcccttggcgcacaacgaccaaccccagaatggggcgcaatgattcgagattctttagaactactctatcttgcaccttggacagtacttttacccggtttcgctattatttttactattttattaagtattattttcagtaatggcttaactaaagccatcaatcaacatcaagaatag

SEQ ID NO: 3422 - protein, 295 aa, Haemophilus influenzae
MQNKEPDEFRESTSIFQIWLRFRQNTIALFSFYLLIALIFTALFASYLAPYADNRQFIGQELMPPSWVDRGKIAFFFGTDDLGRDILSRLIMGTRYTLGSALLVVFSVAIIGGALGIIAGLLKGIKARFVGHIFDAFLSLPILLIAIVISTLMEPSLWNAMFATLLAILPYFIHAIYQAIQQELKKDYVLMLKLEGISNWELLKSTILPNITIIYIQEVARAFVIAVLDISALSFISLGAQRPTPEWGAMIRDSLELLYLAPWTVLLPGFAIIFTILLSIIFSNGLTKAINQHQE

SEQ ID NO: 3423 - DNA, 1050 bp, Haemophilus influenzae
atggcacttttagacatttgtaacctcaatattgaaattcaaacctccaatggacgtataaaaattgtagatggcgtcaatctttcccttaacgaaggggaaatcagtggattagttggcgaatcaggctcaggaaaaagcttaatcgctaaagtcatttgtaatgcaatcaaagaaaattggattattactgccgatcgctttcgttttcacgatgtcgaattacttaaactcagtcctaataaacgccgaaagttagtgggtaaagaaatatccatgattttccaaaatcccttatcttgccttgatccaagtcgaaaaatagggaaacaactcatccaaaatattcctaattggacatttaaaaataaatggtggaaatggtttgggtggaaaaaaagacgtgctattgaattgttacatcgcgtaggaattaaagatcatcgtgatattatggcaagctatcctaacgaactgacagaaggcgaaggacaaaaagttatgatcgcaatggctgtcgctaatcagccacgtttattaatcgcagatgaaccaacaaatacattagaatcaaccactgccctacaagtttttcgtttactttccagtatgaaccaaaatcagggaacaacaattttacttacgagtaacgatattaaaagtattagtgaatggtgcgatcaaatttcagtgctttattgtgggcaaaataccgaatctgccccgactgaaatattaatcgaaagtccccatcatccttatacccaagccttaattaatgcagtacccgattttactcaacctttggggtttaaaactaaattgggtacgttagaaggcaccgcgcctattttagagcaaatgccaattggctgtcgtcttggcccaagatgcccttttgcacaaaaaaaatgtatggaaaaaccaagacgattgaaaataaaacaacacgaattttcttgtcattatcctattaatttacgagaaaaaaatttcaaagaaaaaacaaccgccaccccttttatacttaattgcaaaggaaatgaataa

SEQ ID NO: 3424 - protein, 349 aa, Haemophilus influenzae
MALLDICNLNIEIQTSNGRIKIVDGVNLSLNEGEISGLVGESGSGKSLIAKVICNAIKENWIITADRFRFHDVELLKLSPNKRRKLVGKEISMIFQNPLSCLDPSRKIGKQLIQNIPNWTFKNKWWKWFGWKKRRAIELLHRVGIKDHRDIMASYPNELTEGEGQKVMIAMAVANQPRLLIADEPTNTLESTTALQVFRLLSSMNQNQGTTILLTSNDIKSISEWCDQISVLYCGQNTESAPTEILIESPHHPYTQALINAVPDFTQPLGFKTKLGTLEGTAPILEQMPIGCRLGPRCPFAQKKCMEKPRRLKIKQHEFSCHYPINLREKNFKEKTTATPFILNCKGNE

SEQ ID NO: 3425 - DNA, 810 bp, Haemophilus influenzae
atgcccttattacaagtggaagatttaactaaaacttttaaaggtcacgccagtttatttggtcgaaatcaattcaatgcagtggataaagtgagttttacccttgaacgtaaacaaacacttgcaatcattggcaataatggctctggtaaatcaaccctagtgaaaatgatagcaggtattattccgccaacttctggtcgaattttatttaatgatcgagaattacaatatcaggatgcccaatctagagctaaacatattcgtatggttttccaagatgccaactctgcatttaatccacgtttaaatattggacaaatattagacgaaccattaagcctagcgacagattggacagaaacacaacgtaatgaaaaaatctttgagaccctctctcttgttgggctttatcctgattacacaaatctcaatattaagcatctttctattagccaaaaacagcgtgtcgctttggcacgtgcgctgattttagaacctgaaataattattatagatgatgcaattggcaatttagatgcttctgtacgtattcaattgcttaatttaacccttgatttacaacaacgtttaggtatatcttatatttatgtgggacaggatctcggtgtaattaaacatattgcagatacgattatcgtaatggatgaaggaaaaatgattgaatatggcagccctcaaaatctttttactgatccacaaactgatgttactcgtcgcttagtcgaaagctattttggcaaaattttagatgaaaccgcttgggtaaaagacaaaaacactcactaa

SEQ ID NO: 3426 - protein, 269 aa, Haemophilus influenzae
MPLLQVEDLTKTFKGHASLFGRNQFNAVDKVSFTLERKQTLAIIGNNGSGKSTLVKMIAGIIPPTSGRILFNDRELQYQDAQSRAKHIRMVFQDANSAFNPRLNIGQILDEPLSLATDWTETQRNEKIFETLSLVGLYPDYTNLNIKHLSISQKQRVALARALILEPEIIIIDDAIGNLDASVRIQLLNLTLDLQQRLGISYIYVGQDLGVIKHIADTIIVMDEGKMIEYGSPQNLFTDPQTDVTRRLVESYFGKILDETAWVKDKNTH

SEQ ID NO: 3427 - DNA, 1017 bp, Haemophilus influenzae
atgaacactcgtcccttttatttcggacttatatttattgcgattatcgctatacttgctaactatttaggaaacactgatttttcccatcattatcatatcagtgctttaattattgccatcttgctgggaatggcaatcggcaataccatttatccgcaattttcaacacgagtggaaaaaggcgttttgtttgccaaaggcacgcttcttcgcactggcattgtgctgtatggtttccgcctcacttttggcgatattgccgatgtaggattaaatgctgttgtcactgatgcgattatgctaatttcaaccttcttttttaccgcacttttaggcattcgttatctaaaaatggataaacaattggtttatctcactggggctggatgtagtatttgtggtgcggcagcggttatggcggcagagcctgttaccaaagcagaatctcataaagtttcagtggcgattgccgtagtggtcattttcgggacgcttgctatttttacttaccccttgttctacacgtggtcacaagatttaattaacgcccatcaattcggtatttatgttggttctagtgtacacgaagtggctcaagtgtatgcgattggggaaaatattgatcctatcgtggcaaatactgccgtcatttccaaaatgatccgagtgatgatgctcgccccatttttattaatgctttcttggttattaacacgtagtgatggggtatcagaaaatacgtcacacaaaattacaattccttggtttgctgtactttttattggtgttgcgatttttaattcttttgatttattaccaaaagaactcgtaaacttattagttgaaatcgattctttcttattaatttcatcaatggctgcccttggcttaactacgcaagcaagtgcaatcaagaaagcaggactaaaaccgcttgttttaggcgtattgatttatttatggctagtgattgggggatttttagtgaactatggaatatcaaaattaatataa

SEQ ID NO: 3428 - protein, 338 aa, Haemophilus influenzae
MNTRPFYFGLIFIAIIAILANYLGNTDFSHHYHISALIIAILLGMAIGNTIYPQFSTRVEKGVLFAKGTLLRTGIVLYGFRLTFGDIADVGLNAVVTDAIMLISTFFFTALLGIRYLKMDKQLVYLTGAGCSICGAAAVMAAEPVTKAESHKVSVAIAVVVIFGTLAIFTYPLFYTWSQDLINAHQFGIYVGSSVHEVAQVYAIGENIDPIVANTAVISKMIRVMMLAPFLLMLSWLLTRSDGVSENTSHKITIPWFAVLFIGVAIFNSFDLLPKELVNLLVEIDSFLLISSMAALGLTTQASAIKKAGLKPLVLGVLIYLWLVIGGFLVNYGISKLI

SEQ ID NO: 3429 - DNA, 810 bp, Haemophilus influenzae
atgaaaattgcattaggcattgagtataacgggcaaaattattatggttggcagagacaagaaaaagtccgcagtgtacaagaagaattagaaaaggcactttctcacattgcaaatgaaaaaattgacatattttgtgctggaagaacggattctggcgtaagtggaacgggtcaggttgttcattttgaaaccaatgcggttcgtccagagaaggcttgggcttttggtacgaatgctcatttacctgatgacattgcagtgagttgggcaaaacaagtcgatgatgaattccatgcgagattttctgcaacagcacgccgttaccgttatattctttattgtaataaattacgctctgcgattttagcgggaggaataacccattgccatttagatttagatgcggaaaaaatgcatcaggcagggcaatgtttacttggcgaacaggatttttcctctttccgtgcggcgcaatgtcagtctcatacgccttggcgtaatgtgcatcatttgaatgtgtctcgtatcggaaaatatattattgttgatattcaggcgaacgcttttgtgcatcatatggtgcgcaatattgtgggaagtttgattgaggtcggtgctggaaatcagccgattgaatggatgcaatggctacttgagcagaaaaatcgtcagcttgccgcaccaacagcaaaacccgatggattgtatttggtggatgtgatttatccacaaaagtttgatattcctaaacgcccaattggccctttatttttagaggatggtttattaaatcgtcctttgaaataa

SEQ ID NO: 3430 - protein, 269 aa, Haemophilus influenzae
MKIALGIEYNGQNYYGWQRQEKVRSVQEELEKALSHIANEKIDIFCAGRTDSGVSGTGQVVHFETNAVRPEKAWAFGTNAHLPDDIAVSWAKQVDDEFHARFSATARRYRYILYCNKLRSAILAGGITHCHLDLDAEKMHQAGQCLLGEQDFSSFRAAQCQSHTPWRNVHHLNVSRIGKYIIVDIQANAFVHHMVRNIVGSLIEVGAGNQPIEWMQWLLEQKNRQLAAPTAKPDGLYLVDVIYPQKFDIPKRPIGPLFLEDGLLNRPLK

SEQ ID NO: 3431 - DNA, 1002 bp, Haemophilus influenzae
atgaaaacattaagtgaatttatcgttgaacgccaagctgaatatccaaacgcaaagggggaattgagtggtattttgtcgtcaattcgtcttttagcgaaaattattcatcgagatattaacaaagcaggtttaacaaatattctcggtcaatctggtattgaaaatgtacaaggcgaaagtcaaatgaaactcgatttattcgcccataacacgatgaaagcggcattaatggcacgtgaagaagtggctggttttgcctctgaagaagaagaaagttttatcgcatttgatacagaacgtggccgtaatgcaaaatatattattttaacggatccccttgatggttcttcaaatattgatgtaaacgtatccgtcggtacaattttctctatttaccgtcgcgtatctccaattggctcacctgttaccttagaagattttatgcaaccaggtaataaacaagtcgcggcgggttatattgtttatggttcatcaacaatgttggtatataccactggtaatggagttaatggtttcacttatgatccatcaatcggtacattctgtctttcccacgaaaatatgcaaatgccaaaagagggcaaaatttattccatcaatgaaggacaatacctgaaattcccgcaaggtgtaaaaaaatacattaaatattgccaagaagaagataaagtgactcatcgcccttacgtatctcgctatattggttcacttgtagcagacttccaccgcaatttattaaaaggcggcatttatatttacccaagtgcaaccaactatccaaatggaaaactccgtttattatatgaaggcaatcctattgcatttttagcggagcaagctggtggtgtcgcaacagatggttatcgtcgaattttagatatcgaaccaaccgcacttcatgaacgtgttccactatttgttggttcagaagatatggtaaaaaaagcgcaagaaatgatggaagaatttaaagaataa

SEQ ID NO: 3432 - protein, 333 aa, Haemophilus influenzae
MKTLSEFIVERQAEYPNAKGELSGILSSIRLLAKIIHRDINKAGLTNILGQSGIENVQGESQMKLDLFAHNTMKAALMAREEVAGFASEEEESFIAFDTERGRNAKYIILTDPLDGSSNIDVNVSVGTIFSIYRRVSPIGSPVTLEDFMQPGNKQVAAGYIVYGSSTMLVYTTGNGVNGFTYDPSIGTFCLSHENMQMPKEGKIYSINEGQYLKFPQGVKKYIKYCQEEDKVTHRPYVSRYIGSLVADFHRNLLKGGIYIYPSATNYPNGKLRLLYEGNPIAFLAEQAGGVATDGYRRILDIEPTALHERVPLFVGSEDMVKKAQEMMEEFKE

SEQ ID NO: 3433 - DNA, 876 bp, Haemophilus influenzae
atggctgaaaatcgttatgaactaaataaaaacttagcacagatgctcaaaggtggtgttatcatggatgttcaaaaccctgaacaagctcgcattgcagaagctgctggtgcagctgcagtgatggctttggaacgaattcctgcagatattcgtgctgttggaggtgtctctcgaatgagcgatcctaagatgatcaaggaaatccaaggagcagttagcattccagttatggcaaaagttagaattggacatttcgttgaggctcagattttggaagctattgaaattgactatatcgatgagagtgaagtgctttctccagctgacaaccgtttccatgtggacaagaaagaattccaagtaccttttgtatgtggtgccaaggatttgggcgaggccttgcgtcgtatcgctgaaggggcttcaatgattcgtacaaaaggagaaccaggaacaggagatatcgtccaagctgttcgccatatgcgcatgatgagtcaagaaattcgtcgcattcaaaatttacgtgaggacgagctctatgttgcggccaaagatttacaagttcctgtagaattggttcaatacgtccataagcatgggaaattgccagttgtcaacttcgcagctggaggaattgcaactccagcagatgcggccttgatgatgcaacttggcgcagagggtgtctttgttggttcaggtatttttaagtcaggagatcctataaaacgtgcgagtgctattgtcaaagctgtaactaactatcgaaatccacaaatcctagcacaaatctccgaagatttaggtgaagccatggttggtatcaatgaaaatgaaatccaaattctcatggctgagcgaggaaaataa

SEQ ID NO: 3434 - protein, 291 aa, Haemophilus influenzae
MAENRYELNKNLAQMLKGGVIMDVQNPEQARIAEAAGAAAVMALERIPADIRAVGGVSRMSDPKMIKEIQGAVSIPVMAKVRIGHFVEAQILEAIEIDYIDESEVLSPADNRFHVDKKEFQVPFVCGAKDLGEALRRIAEGASMIRTKGEPGTGDIVQAVRHMRMMSQEIRRIQNLREDELYVAAKDLQVPVELVQYVHKHGKLPVVNFAAGGIATPADAALMMQLGAEGVFVGSGIFKSGDPIKRASAIVKAVTNYRNPQILAQISEDLGEAMVGINENEIQILMAERGK

SEQ ID NO: 3435 - DNA, 579 bp, Haemophilus influenzae
atgaaaatcggaatattagctctacaaggtgcctttgcggaacatgcacaaatgctagaaaaattaggaattgaaagtgtcgaactgagaaatttaaaaaattttcaacaacattacagtgatttatcaggtttgattctacctggcggtgagtcaaccgccataggaaaacttttaagagagctgtatatgctggaaccgataaaacaagctatctcttctggctttcctgtctttggaacttgtgctggtttgattctgttggctaaagagattacttctcagaaagagagtcattttggaacaatggacattgtggttgagaggaatgcctatggacgccaattgggaagtttctatacagaagcagattgcaaaggggttggtaaaattcctatgacttttatcagaggacctatcatcagtagtgttggtaaaaaagtcaatattcttgcaacggtaaataataaaatcgttgcagcccaagaaaagaatatgctggtaacatcatttcatcctgaattaacaaataacttgagtttgcataagtactttatcgatatatgtaaagtagcataa

SEQ ID NO: 3436 - protein, 192 aa, Haemophilus influenzae
MKIGILALQGAFAEHAQMLEKLGIESVELRNLKNFQQHYSDLSGLILPGGESTAIGKLLRELYMLEPIKQAISSGFPVFGTCAGLILLAKEITSQKESHFGTMDIVVERNAYGRQLGSFYTEADCKGVGKIPMTFIRGPIISSVGKKVNILATVNNKIVAAQEKNMLVTSFHPELTNNLSLHKYFIDICKVA

SEQ ID NO: 3437 - DNA, 1695 bp, Haemophilus influenzae
atgtctgttcaacaacccatttcacgactgaccgatattgttggatctcgttatattattactgatccaactaaaacagaagcttatcgaagtggttatcgatttggaacaggaaacgccctagctgttgttcgccctgccactctacttgagttttggaacattgtaaaagtttgcgttgaacatgatgttattgttataaaccaagcggcgaatacaggtttaactggtggctctacaccagatggcaatgattatgatcgcgatattgtcgtcatcaatacaatgcgaattgacggaatccaactcatcaataacgcttcccaagttatttgcttaccaggctctacactcaatgaattagaaaatcaacttaaaccgtttggtcgtgaaccccactctgttattggctcatcttgcattggtgcatcagttattggtgggatttgtaacaactcaggtggagcattagttcaacgtggaccagcctatacagaaatggcactttacgctcaacttaatgaaaaaggtgaattagaactaaaaaatcatttaggcattgatttaggagaaactcctgaagaaattttaactaatctacaagaaaaacgttatcaggttaaagatattcgacaagattgcggacatggtcacgaccattactactgcaactatgttcgtcaagttgatgaaggctcccctgctcgttttaatgctgacccagctcgccactatgaagcctcaggctgtgcaggaaaacttgctgtctttgcggttcgtttagacacctttccgcttgaaaaagagacggctgttttctatatcggcaccaatcaaacttctgtgttgagcgatattcgtcgccacatgttagtaaacttcgaagtgctacccatttcaggtgaatatatccatcgtgatgcatttgacatcgcagcaaaatatggcaaagataccttttgggtcattaaaaagtttggtacacattggctaccaaaactcttttccttaaaatcaaacgtggatcgcatcggcaaaaaattcttctttttaccacaacatttaagcgataaacttatgcaaactgtgtctaaattcatcccagaacatcttccacaaagcttatgggattatcgcaacaaatacgagcatcacttaattatcaaaatgggtggaaaaggcattcaagaagcccgtgaatatttggaatcctacattgcagatggctcaaaaggtggctattttgaatgtaatgcaatcgaaacccaagcagcaatgcttcatcgtttcgctgttgcaagtgctgcaattcgttatcgtgcaattcacgaaaaagaagtagaagaaatagttgctttagatgttgcattacgtcgcaatgatcaagattggtttgaagtgttaccgccagaaattgataacagaattatctctaaactttactacggacattttatgtgtcatgtctttcaccaagattacattgtaaaaaaaggttatgattatgaagaactagaatacgaaatgttgaaattacttgacaagcgtggtgcgcaatacccagccgaacacaatgtagggcatttatacgaggctaaaccaaccttgagaaaattctataaagagttggatccaaccaatagctttaatccaggtattggtaaaacgacgaggaaaaaatactgggcggaataa

SEQ ID NO: 3438 - protein, 564 aa, Haemophilus influenzae
MSVQQPISRLTDIVGSRYIITDPTKTEAYRSGYRFGTGNALAVVRPATLLEFWNIVKVCVEHDVIVINQAANTGLTGGSTPDGNDYDRDIVVINTMRIDGIQLINNASQVICLPGSTLNELENQLKPFGREPHSVIGSSCIGASVIGGICNNSGGALVQRGPAYTEMALYAQLNEKGELELKNHLGIDLGETPEEILTNLQEKRYQVKDIRQDCGHGHDHYYCNYVRQVDEGSPARFNADPARHYEASGCAGKLAVFAVRLDTFPLEKETAVFYIGTNQTSVLSDIRRHMLVNFEVLPISGEYIHRDAFDIAAKYGKDTFWVIKKFGTHWLPKLFSLKSNVDRIGKKFFFLPQHLSDKLMQTVSKFIPEHLPQSLWDYRNKYEHHLIIKMGGKGIQEAREYLESYIADGSKGGYFECNAIETQAAMLHRFAVASAAIRYRAIHEKEVEEIVALDVALRRNDQDWFEVLPPEIDNRIISKLYYGHFMCHVFHQDYIVKKGYDYEELEYEMLKLLDKRGAQYPAEHNVGHLYEAKPTLRKFYKELDPTNSFNPGIGKTTRKKYWAE

SEQ ID NO: 3439 - DNA, 111 bp, Haemophilus influenzae
atgccaaacgaacgtaatattcaaaattatcactcgacttacaacaacattcgggattggcttggttatcaaaaagctggcgaggaaaaagcaaagtcgaccatcaattag

SEQ ID NO: 3440 - protein, 36 aa, Haemophilus influenzae
MPNERNIQNYHSTYNNIRDWLGYQKAGEEKAKSTIN

SEQ ID NO: 3441 - DNA, 279 bp, Haemophilus influenzae
atggatggcatattacgtaaactcatttcaatgaaggatttacaccattgcctgcagaaattttttgtggatgaaagagaatctattctagaaatgaatgataataagctttcagaacagtttgatttagcattgattgaaacgcatggtaaatccaaaattttaaaaaatttatctttattcaaacaaaccatgcctaattatcttactcaattatcaaaagataatatgaaagaaacagaaaatactgttcataaaattaaaagagtagcagcatag

SEQ ID NO: 3442 - protein, 92 aa, Haemophilus influenzae
MDGILRKLISMKDLHHCLQKFFVDERESILEMNDNKLSEQFDLALIETHGKSKILKNLSLFKQTMPNYLTQLSKDNMKETENTVHKIKRVAA

SEQ ID NO: 3443 - DNA, 552 bp, Haemophilus influenzae
atgttgaaaagaattttagttattattggtttagctgtattagcaaccgcttgttctaatgcaccacgaacggtaagtcatcaggttatttcagaaaatgatgatattcaattaactggtttaattaataatttagaaaaagataatcgaacaggcatttttcacaaagtgagaacaaaccgttcctctgctttgatgggcgataaggctctagccagtgtttataatgaatgggttggcactcgctatcgtatgggcggtacgactaaacgtggtattgattgttcagcatttatgcaaactactttttctgaagtttttggtattgaattgcctcgttctacggctgaacagcgtcatttaggtagaaaaattaataaatcagaacttaaaaaaggcgatttagttttcttccgtaaaaataatcacgttggtgtttatattggtaataaccaatttatgcatgcaagtacggggcaaggtgtgacaataagttcccttgatgaaaaatattgggctagaacctacactcaatcgcgtcgtattatgtaa

SEQ ID NO: 3444 - protein, 183 aa, Haemophilus influenzae
MLKRILVIIGLAVLATACSNAPRTVSHQVISENDDIQLTGLINNLEKDNRTGIFHKVRTNRSSALMGDKALASVYNEWVGTRYRMGGTTKRGIDCSAFMQTTFSEVFGIELPRSTAEQRHLGRKINKSELKKGDLVFFRKNNHVGVYIGNNQFMHASTGQGVTISSLDEKYWARTYTQSRRIM

SEQ ID NO: 3445 - DNA, 1449 bp, Haemophilus influenzae
atgttaaaccaagtttcaaatacattactcacaccaagtaatctttcaactcaaacattactcaatatttttgacattatgtcgcatcgcaatattgattatgccgatctgtattttcaacttagccaagatgaaagttgggtattagaagacggcattataaaagaaggcggttttcatattgatcgtggcgttggtgtgcgggctgtttctggcgagaaaacggggtttgcttatgcggatcaaattaatcttgcttctttgcagcaatgtgcggaggcggtaaagggaatcgcgcaagtcaaacaggggaatttgatttcgccatccgcttttaatgttgtaaatcctattgctcgttatgcggcgattaatcctttggaaagtttgactaaagagaaaaaaattgagctattacatttggttgatcgtacagcacgcgcagaagatcatcgtgtaaccaaggtttcagcaagcctcagttccgtttatgaagaagtattaattatggcgacggatggcacattagccgcagatattcgccctttagttcgcttatctatttctgtgttagtagaggaaaatggaaaacgtgaacgaggaagttgtggttctggtgggcgtttcggtttagattggttctttgaagttgttgatggcgatattagagcggtactttttgctaaagaagcggttcgtcaagcattagtaaaccttagtgcagttgcagcacccgcaggattgatgcctgttgtgttaggtgcgggttggccgggcgtgttgctacacgaagcggtaggtcacggtttagaaggcgattttaaccgtaaagaaagttcactttttacaggcaagattggtgagcaagtgacttcaccgttatgtacgattgtggatgatggcacgattgaaaatcgtcgaggttcactaactattgatgatgaaggtgtgccaagccagtgcaatgtactcatcaaagacgggattttgcaaggttacatgcaagataaaatgaatgcccgtttgatgggcgtagcacctacgggaaatggacgacgtgagtcttatgcccatttaccaatgcctcgaatgactaacacctatatgcttgctggacaaagtcagtttgatgatttgattgcttctgtaaaacaggggatttatgcaccgcactttggtggagggcaagtggatattacctctggtaaatttgtattttctacttcagaagcttatttaattgaaaaaggaaaaatcacgaaaccagttaagggcgcaactttaattggcagtggcattgaagtgatgcaaaaaatttctatggttgcagataaatcagagcttgatttaggtatcggggtttgtggtaaagagggacaaagtgtacctgttggcgtaggacagccagcactaaaaattgatgaaattactgttggtggaacaaattaa

SEQ ID NO: 3446 - protein, 482 aa, Haemophilus influenzae
MLNQVSNTLLTPSNLSTQTLLNIFDIMSHRNIDYADLYFQLSQDESWVLEDGIIKEGGFHIDRGVGVRAVSGEKTGFAYADQINLASLQQCAEAVKGIAQVKQGNLISPSAFNVVNPIARYAAINPLESLTKEKKIELLHLVDRTARAEDHRVTKVSASLSSVYEEVLIMATDGTLAADIRPLVRLSISVLVEENGKRERGSCGSGGRFGLDWFFEVVDGDIRAVLFAKEAVRQALVNLSAVAAPAGLMPVVLGAGWPGVLLHEAVGHGLEGDFNRKESSLFTGKIGEQVTSPLCTIVDDGTIENRRGSLTIDDEGVPSQCNVLIKDGILQGYMQDKMNARLMGVAPTGNGRRESYAHLPMPRMTNTYMLAGQSQFDDLIASVKQGIYAPHFGGGQVDITSGKFVFSTSEAYLIEKGKITKPVKGATLIGSGIEVMQKISMVADKSELDLGIGVCGKEGQSVPVGVGQPALKIDEITVGGTN

SEQ ID NO: 3447 - DNA, 852 bp, Haemophilus influenzae
atgactgatttaaccggaattttatacattgttgccacaccgattggcaatttacaggatattacccagcgtgctttagagacttttgctcaagtggatttaattgcagcagaagatactcgccatagtggacttttattgagccattacggcattaagaagtcattttttgctttgcacgatcataacgaacaagaaaaagcgcatattttggtggaaaagctcaagcaggggagtaatattgctttgatttctgatgcggggacgccattaatcagtgaccctggttttcatttagtacgccaatgccgtgaagctggtattcgagttgtgcctttgccaggagcttgtgcggcaattaccgctctttgtgcatcggggattgcttctgatagattttgttttgaaggctttttacctgcgaaaagtaaagcacgcaaagataaattagaaaatatcgcagaagaagaccgcactttgattttttatgaatccactcaccgtattttagatacactagaagatatgcaagcggtgctaggggaaggacgctatattgtgttagcccgtgaaatgactaaaacttgggaaacgattacggggaatacgattaaaaatttacgcgaatggcttttagaagatcccaatcgtacaaaaggcgagatggttttgattgtggaaggcaaaccaaagtctgacaataacgatgaaatttcgccgcaagcggtaaaggcacttgagttaattgcagaagaattgccacttaaaaaagcagcagctatagttgctgagttgtatggttataagaagaatgctttgtatcaatttggattagcgcatttggaaaaataa

SEQ ID NO: 3448 - protein, 283 aa, Haemophilus influenzae
MTDLTGILYIVATPIGNLQDITQRALETFAQVDLIAAEDTRHSGLLLSHYGIKKSFFALHDHNEQEKAHILVEKLKQGSNIALISDAGTPLISDPGFHLVRQCREAGIRVVPLPGACAAITALCASGIASDRFCFEGFLPAKSKARKDKLENIAEEDRTLIFYESTHRILDTLEDMQAVLGEGRYIVLAREMTKTWETITGNTIKNLREWLLEDPNRTKGEMVLIVEGKPKSDNNDEISPQAVKALELIAEELPLKKAAAIVAELYGYKKNALYQFGLAHLEK

SEQ ID NO: 3449 - DNA, 1728 bp, Haemophilus influenzae
atgtctattctattacaaggcgaacgttttaaaaaacgtttaatgccaattttattgtcaatggctttagctggctgttcaaatctacttggtagcaatttcacgcaaaccttacaaaaagatgcaaatgcaagttctgaattttatataaacaaattagggcaaacacaagaacttgaagatcaacaaacctataaattgctcgcggctcgagtattaatccgtgaaaacaaggttgaacaatcggcagcgttattgagggaattaggcgaattaaatgatgcacaaaaattagatcgtgcattaattgaagcgagaatttctgctgcaaaaaatgccaatgaagtcgcgcaaaatcaattacgtgcattggatttaaataaactaagcccgtcacaaaaatctcgttattacgaaaccttagctattgttgccgaaaaccgtaaagacatgattgaagcggtaaaagcgcggatagaaatggataagaatttaacagatgtacaacgtcgtcaagataatattgataaaacttgggctttattgcgttcagcgaatactggcgttattaataatgcctctgatgaaggtaatgcagctttaggcggttggctaacattaatcaaagcctacaacgattatattcgtcagcctgtacaattaagccaagccttacaaagttggaaaaatgcttatccaaatcatgcagccgcaacgctgttcccaaaagaattgcttacattgcttaatttccaacaaacgaatgtgtcacaaattggtttactcttgccattaagtggagatggacaaattcttggtacaaccattcaatcgggtttcaacgacgcgaaaggtaactcaaccattcctgtgcaagtgtttgatacctcaatgaattctgtccaagatatcattgcgcaagcaaaacaagcggggattaaaaccttagttggtccattactaaaacaaaatcttgatgtgattttagcggatcctgctcaaattcaaggtatggatgtacttgcattaaatgccacaccaaattctcgtgcgattcctcaactttgttattacggactttcgccagaagatgaagctgaatctgccgccaataaaatgtggaacgatggcgtgcgtaatccacttgtcgcaatgccgcaaaatgatttaggacaacgcgtaggcaatgcctttaatgtacgttggcagcaattagcaggtactgatgcgaatatccgttactacaatttgcctgcggatgtgacctatttcgttcaagaaaataactcaaatacaaccgcactttatgccgtagcaagtccaactgaactggcagaaatgaaaggttatttaacaaatatcgtacctaatttagcgatttatgccagttctcgagcaagcgcaagtgcgacaaacactaataccgacttcatcgcacagatgaacggtgtacagtttagtgatattccattttttaaagataccaattctccacaatatcagaagttagcaaaatccacggggggcgaatatcaattgatgcgtttatatgcaatgggtgcggatgcgtggttgctcattaatcaatttaatgaattacgccaagtgccaggctatcgcttgagtggcttaacagggattttaagtgctgataccaactgtaatgttgaacgcgatatgacttggtatcaatatcaagatggtgcaattgtaccagttgcaaactaa

SEQ ID NO: 3450 - protein, 575 aa, Haemophilus influenzae
MSILLQGERFKKRLMPILLSMALAGCSNLLGSNFTQTLQKDANASSEFYINKLGQTQELEDQQTYKLLAARVLIRENKVEQSAALLRELGELNDAQKLDRALIEARISAAKNANEVAQNQLRALDLNKLSPSQKSRYYETLAIVAENRKDMIEAVKARIEMDKNLTDVQRRQDNIDKTWALLRSANTGVINNASDEGNAALGGWLTLIKAYNDYIRQPVQLSQALQSWKNAYPNHAAATLFPKELLTLLNFQQTNVSQIGLLLPLSGDGQILGTTIQSGFNDAKGNSTIPVQVFDTSMNSVQDIIAQAKQAGIKTLVGPLLKQNLDVILADPAQIQGMDVLALNATPNSRAIPQLCYYGLSPEDEAESAANKMWNDGVRNPLVAMPQNDLGQRVGNAFNVRWQQLAGTDANIRYYNLPADVTYFVQENNSNTTALYAVASPTELAEMKGYLTNIVPNLAIYASSRASASATNTNTDFIAQMNGVQFSDIPFFKDTNSPQYQKLAKSTGGEYQLMRLYAMGADAWLLINQFNELRQVPGYRLSGLTGILSADTNCNVERDMTWYQYQDGAIVPVAN

SEQ ID NO: 3451 - DNA, 360 bp, Haemophilus influenzae
atgttttctttaaaacgtcggcaaggggcgagctttgagcatcaagctcgcctttttttagaatcaaaaggcttaacatttattgcggctaatcaaaatttcaaatgtggtgaacttgatctaataatgaatgacaaagaaactatcgtctttgttgaagttcgccaacgaagtcattccgcctatggttctgctatagaaagcgtagattggcgaaaacaacaaaaatggttagatgccgcaaatttatggcttgcaaaacaaaatatgagcttagaagatgctaattgccgctttgatttaatcgcttttggcaaaacacctcaagatattcaatggattcctaattttctcgattaa

SEQ ID NO: 3452 - protein, 119 aa, Haemophilus influenzae
MFSLKRRQGASFEHQARLFLESKGLTFIAANQNFKCGELDLIMNDKETIVFVEVRQRSHSAYGSAIESVDWRKQQKWLDAANLWLAKQNMSLEDANCRFDLIAFGKTPQDIQWIPNFLD

SEQ ID NO: 3453 - DNA, 585 bp, Haemophilus influenzae
atgttacaaaaagtaaaagatatttatagcgaaagtattcaaattcaaattgcagcatcaagtatgctttctgaaaatattaccaacgccacacaaatggtaatgcaatgtttattaggcggtaataaggttatcgcctgtggcgtgtcgcgttcttatgctaatgcacagtttctcgtctcaaacttacttaatcgatatgatttagttagaccgagcttcccgtctgtgttattgagcttagaaagtgcggtgggttcttcacttgtttttgaacaatcgcctgaagaattgtattgtcatcaatttaatgccattgcaaaatcgggcgacttacttattgcttttgcacctttggggacagaaaaaatcgtactaaatattatttctcatgctgtcagcaaagaagttaatgttattgtgctaactggctctaacaacgatgccattcaaggaattttagcagataaggatctagaaatatcaatcccagccaccaaagaaagtcgtatcttagagaaccatctttttgtgattaatgcactttgtgaattggttgatcagactttattcccaagtgcttga

SEQ ID NO: 3454 - protein, 194 aa, Haemophilus influenzae
MLQKVKDIYSESIQIQIAASSMLSENITNATQMVMQCLLGGNKVIACGVSRSYANAQFLVSNLLNRYDLVRPSFPSVLLSLESAVGSSLVFEQSPEELYCHQFNAIAKSGDLLIAFAPLGTEKIVLNIISHAVSKEVNVIVLTGSNNDAIQGILADKDLEISIPATKESRILENHLFVINALCELVDQTLFPSA

SEQ ID NO: 3455 - DNA, 582 bp, Haemophilus influenzae
atgacattatccccgttaaaaaaactcgctatcctgcttggggcgactatttttctacaaggctgtgttgcagctgtgattggaggtggcgctgtagcagctaaagtagctaccgatccccgaacgacagggacacaaattgatgatgaaaccctcgaatttaaagtagaaaatgctgtagaaaaagatgcccaaattaaggctgaaggccgtgtaaatgcagtgtcttacaatggccgagtacttttaataggtcaagttcctaatagtgatgtaaaagacactgccacagctcttgcaaaaggagttgaaggtgtcaatgaagtttataatgaactaactgttagcccaaaaatctcttttgcacaaatcagtaaagatagttggctcacaacgcaagtcaaatctaagatgttcgttgatggtcgagttaaagccacagatgtcaaagtgattagtgaaaatggagaagtatttttactgggtaacgtcacacaatctcaagccaatgcggcagccgacattgccagcaaaatcagcggcgtgaaaaaagtaattaaagtattcaaatacctagactaa

SEQ ID NO: 3456 - protein, 193 aa, Haemophilus influenzae
MTLSPLKKLAILLGATIFLQGCVAAVIGGGAVAAKVATDPRTTGTQIDDETLEFKVENAVEKDAQIKAEGRVNAVSYNGRVLLIGQVPNSDVKDTATALAKGVEGVNEVYNELTVSPKISFAQISKDSWLTTQVKSKMFVDGRVKATDVKVISENGEVFLLGNVTQSQANAAADIASKISGVKKVIKVFKYLD

SEQ ID NO: 3457 - DNA, 2271 bp, Haemophilus influenzae
atgaataaaagtttaatggttacaaagcgtgacggtacgcaagaacaaatcaatcttgataaaatccatcgtgtgattacgtgggctgctgaaggactagacaatgtttctgtttctcaagtagaacttcgttcacatattcaattttatgaaggcattcgcacttcagacatccacgaaaccattattaaagcagccgcagatttaatcagcaaagattcgccagattatcaatatttagctgctcgtttagcgattttccatttacgtaaaaaagcctatggtcatttcgatccccctcgtttatacgatcacgtcaaaaaactagtacgtataggaaaatatgatcaagcgttattagatgattatactcgtgaagaatgggacacaatggacggcttcatcgatcattggcgtgatatgacgttttcttatgctgcagtgaagcaattggagggtaaatatttagtacaaaaccgtgtgacgggagaaatctacgagtctgcacaattcttatatttgctggtttccgcaagtctattctctaaatatccaaaagaaacacgtttggattatgtaaaacgtttctacgatgcaacatcgactttcaaaatttccttacctacaccaattatggcgggtgtgcgtacaccaactcgtcagttcagctcttgcgtattaattgaatgtgatgacagtttagattcaatcaatgcaacagcatcagctattgtaaaatatgtttcacaacgtgcagggattggtattaatgcaggggctattcgtgcattaggtagcgaaattcgtggtggagaagcattccatacaggttgtattccattctataaatatttccaaactgcggtgaaatcttgctcacaaggtggcgttcgtggcggtgcagcaacactttattacccaatttggcacttagaagcagaaaacttgctcgtattaaaaaataaccgtggtgtagaagacaaccgtgttcgtcatatggattatggcgtccagttaaacaaattaatgtatcaacgtttaattaaaggtggcgagattactttatttagtccatcagatgtacctggactttatgaagcattctttgcggatcaagacaaatttgaagaactttacgtaaaatacgaacaagatccaactatccgtaagcgtactgttaaagcagttgaaatcttttctttattaatgcaagaacgggcatcaacgggtcgaatttacattcaaaacgtggatcactgtaatacccactctccgtttgatccactagttgcaccagttcgtcaatctaacttatgcttagaaattgcattaccaactaaaccgcttcagcacattaacgatgaaaatggggaaattgcactttgtacactttccgcttttaacttaggtaaaattgaaaacttagatgaattagaagaacttgcggatcttgctgttcgttctcttgatgccttattagactatcaagattaccctgttgtggcagcaaaacgtagctcacttgcacgccgttcactcggtattggggtcattaactatgcgtattaccttgcgaaaaatggtgttcgctattctgatggttcagccaacgatttaacacaccgcacttttgaagccattcaatattatttattgaaagcctctatgaacttagcaaaagagcaaggtgcgtgtgaatactttaatgaaaccacttatgcaaaaggcattttaccgattgatacctataagaaagatttagattccttaacacaagagcctctacattatgattgggaaagtttacgtaaagatattcaagaatttggtttacgtaactcaacattaactgccttaatgccatcagaaacatcatcgcagatttccaatgcgactaatggtattgagccaccgcgtggacacgtaagtattaaagcatcaaaagatggtatcttaaaacaagttgtacctgaatatgaaaatttaatggataactatgaattactttgggatattccaagtaatgacggctacttacacttagtcggtattatgcaaaaattcgtggatcaagcgatctctgcaaacacaaactatgatccaaaacgttttgaagacggcaaagtaccaatgaaagtgttgttaaaagatcttttaaccgcttacaaatacggtttaaaaaccctttactatcaaaatacccgcgacggtgccgaagatgttcaagaagatcttgatgacggctgtgctggtggtgcttgcaaaatttaa

SEQ ID NO: 3458 - protein, 756 aa, Haemophilus influenzae
MNKSLMVTKRDGTQEQINLDKIHRVITWAAEGLDNVSVSQVELRSHIQFYEGIRTSDIHETIIKAAADLISKDSPDYQYLAARLAIFHLRKKAYGHFDPPRLYDHVKKLVRIGKYDQALLDDYTREEWDTMDGFIDHWRDMTFSYAAVKQLEGKYLVQNRVTGEIYESAQFLYLLVSASLFSKYPKETRLDYVKRFYDATSTFKISLPTPIMAGVRTPTRQFSSCVLIECDDSLDSINATASAIVKYVSQRAGIGINAGAIRALGSEIRGGEAFHTGCIPFYKYFQTAVKSCSQGGVRGGAATLYYPIWHLEAENLLVLKNNRGVEDNRVRHMDYGVQLNKLMYQRLIKGGEITLFSPSDVPGLYEAFFADQDKFEELYVKYEQDPTIRKRTVKAVEIFSLLMQERASTGRIYIQNVDHCNTHSPFDPLVAPVRQSNLCLEIALPTKPLQHINDENGEIALCTLSAFNLGKIENLDELEELADLAVRSLDALLDYQDYPVVAAKRSSLARRSLGIGVINYAYYLAKNGVRYSDGSANDLTHRTFEAIQYYLLKASMNLAKEQGACEYFNETTYAKGILPIDTYKKDLDSLTQEPLHYDWESLRKDIQEFGLRNSTLTALMPSETSSQISNATNGIEPPRGHVSIKASKDGILKQVVPEYENLMDNYELLWDIPSNDGYLHLVGIMQKFVDQAISANTNYDPKRFEDGKVPMKVLLKDLLTAYKYGLKTLYYQNTRDGAEDVQEDLDDGCAGGACKI

SEQ ID NO: 3459 - DNA, 1131 bp, Haemophilus influenzae
atggcatacaccactttctcacaaaacaaaaacgatcaattaaaagaaccaatgttctttggtcaaaacgttaatgttgcgcgttacgatcaacaaaaatacgaaacttttgaaaagctcattgaaaaacaactttcttttttctggcgtccagaagaagtagatgtatcgcaagaccgtattgattatgctgcgttacctgagcatgaaaaacacattttcatcagtaacttaaaatatcagaccttgttagattccattcaaggccgtagtccgaacgtggcactattgcctttagtgtctattcctgaattagaaacttggattgaaacttggacattctctgaaaccatccactctcgctcttacacacatattattcgtaatattgtgaacgatccttctatcgtatttgatgacatcgtaactaacgaagaaatcatcaaacgcgcacaagatatttcttcttattacgatgatttaatccgtgatagccaactttatggcttatacggcaaaggcacttataccgtagatggcaaagaatgcgtcgtgactttacgtagtttgaaaaaacaactttacctttgcctaatgagcgtgaatgcacttgaagcaattcgtttctacgtttctttcgcttgttcatttgcttttgcagaacgtcgtttaatggaagggaatgcaaaaattattaaatttatcgcacgtgatgaagccttgcatttaacaggtacacagcatattttaaatattatggctgcaggtcaagacgatcctgaaatggcagaaattgcggaagaatgtaaacaagaagcctatgatttatttgttgcagcggcagaacaagaaaaagcttgggctgattatctatttaaagacggttctatgatcggcctcaacagagatattttagttcaatacgtagaatatattactaatatccgtatgcaagctgttggattgccactaccattccaaacacgttcaaatccaattccttggattaacgcttggttagtgtcagataacgtacaggttgcaccacaagaagtagaagtaagctcttatcttgtaggtcaaattgactcaaaagttgatacgaatgattttgacgatttttctctctaa

SEQ ID NO: 3460 - protein, 376 aa, Haemophilus influenzae
MAYTTFSQNKNDQLKEPMFFGQNVNVARYDQQKYETFEKLIEKQLSFFWRPEEVDVSQDRIDYAALPEHEKHIFISNLKYQTLLDSIQGRSPNVALLPLVSIPELETWIETWTFSETIHSRSYTHIIRNIVNDPSIVFDDIVTNEEIIKRAQDISSYYDDLIRDSQLYGLYGKGTYTVDGKECVVTLRSLKKQLYLCLMSVNALEAIRFYVSFACSFAFAERRLMEGNAKIIKFIARDEALHLTGTQHILNIMAAGQDDPEMAEIAEECKQEAYDLFVAAAEQEKAWADYLFKDGSMIGLNRDILVQYVEYITNIRMQAVGLPLPFQTRSNPIPWINAWLVSDNVQVAPQEVEVSSYLVGQIDSKVDTNDFDDFSL

SEQ ID NO: 3461 - DNA, 1230 bp, Haemophilus influenzae
atgacaatcgaaattcttgttccagacctacctgaatcagttgcagatgcaactgttgctacttggcataaaaaactgggcgatactgtgaaacgtgatgaggttattgtggaaattgaaacggataaagtcgtgctagaagttcccgcactttctgatggtgtactggctgaagttgttcaagctgagggcgaaacagtggtgagtaaacagttgctaggcaaaatttctacggctcaagaaggagatgtcagttcagcgacgttaaaagcaacgaatgaacccacaccttctgatcgtcaaaatgcagcgattgaaaatagtcataatcataatgtggatcagagccctgcaattcgtcgtttattagcagaacatgatttacaagcagatcaaattcaaggttcgggagtgggtggtcgtttaacacgtgaagatattgaacgtgaaattgcaaaacgacaagcacagcaagtgaaacaagaagctgccactgagcaaaatacaattagtacggtggcttatagtgcacgttctgaaaaacgtgtgccaatgacccgtttgcgtaaacgtattgctgaacgtttacttgaagccaaaaatagtacggcgatgcttaccactttcaatgaagtggatatgcagccgataatgactctgcgtaaaacctacggcgaaaaatttgaaaaacaacattcagtacgtttaggatttatgtctttttatattaaagcggttgtggaagcattgaaacgctatcctgaagtgaatgcttctattgatggggatgatgttgtttaccataactattttgatattagtattgcagtttcaacaccgcgtggattagtcacaccagtgcttcgtgattgcgataagctcagtatggcagagatcgaaaaacaaattaaagcattagctgaaaaaggtcgtgatggcaaattaacagtagaagatcttactggcggcaattttactattacaaatggtggcgtgttcggttctcttatgtccactccaattatcaatccaccacaaagtgcgattttaggaatgcacgctattaaagaacgcccgattgcgcttaatggtcaagttgtgattcgtcctatgatgtaccttgctttatcttacgatcatcgtttaattgacggccgtgaatctgttggtttcttggtaacgattaaagaattattggaagatccaacaagattgttattagaaatctaa

SEQ ID NO: 3462 - protein, 409 aa, Haemophilus influenzae
MTIEILVPDLPESVADATVATWHKKLGDTVKRDEVIVEIETDKVVLEVPALSDGVLAEVVQAEGETVVSKQLLGKISTAQEGDVSSATLKATNEPTPSDRQNAAIENSHNHNVDQSPAIRRLLAEHDLQADQIQGSGVGGRLTREDIEREIAKRQAQQVKQEAATEQNTISTVAYSARSEKRVPMTRLRKRIAERLLEAKNSTAMLTTFNEVDMQPIMTLRKTYGEKFEKQHSVRLGFMSFYIKAVVEALKRYPEVNASIDGDDVVYHNYFDISIAVSTPRGLVTPVLRDCDKLSMAEIEKQIKALAEKGRDGKLTVEDLTGGNFTITNGGVFGSLMSTPIINPPQSAILGMHAIKERPIALNGQVVIRPMMYLALSYDHRLIDGRESVGFLVTIKELLEDPTRLLLEI

SEQ ID NO: 3463 - DNA, 2808 bp, Haemophilus influenzae
atgcagcaaaacaaggcgtttgatgattggttagccagcacagcattaggcggtgcaaatcaatcttatatagaagaactttatgaaagctatttgagtgatccacagtcggtggaggaaagctggcgaaaaacctttgattctttgccaaaaaccaccgcacttgaacagccccatactccagtgcgagattattttcgtcgcttagcgcgagaaaatcataatgaagcggtgacagtgatagatcctgctgctggtgcaaaattagtgaaagttctacaatttatcaatgcctatcgttttcgtggtcatttagaggctaatcttgatcctctcaattattatcgttggaaagtatcttccgtccctgaattagattatcgccatcacggttttactgaacaagatctcaacgaaactttcaatataaatcattacgtttataaacgcgataccattaaacttggcgaattagctcaaatgttgaaagaaacatattgtggctcaattggcttggagtttatgcatgtgcaagatatggagcagaaaatatggcttcagagtaaaatggaaagcctgttagataaaccgatttttacatctgaagaacgtgtcaattttcttcgtgaacttacggcagcagacggtttagaacgttatcttggtgcgaaattccctggggcgaaacgcttttccttagaaggaagtgatgcgtttattccattgatgaaagaaattattcgccattctagtcgtcaaggggtaaatgatgtggtaatgggaatggcacaccgtgggcgtttgaatatgcttgtgaatgtattaggtaaaaagcctgaaaatttattcgatgaatttgcaggtaaacattccagcgaacgtacgggggatgtgaaatatcatcaaggtttttcttctgatttcgccgtagatgataagcgagttcacttaacgttggcatttaatccatcccatttggaaatcgtaagccctgttgtgattggttctgttcgatctcgacaaactcgtatgaatgatacggaacatagcaaagtgcttgctattactgttcacggagattcagctgtggcaggacagggggttgttcaagaaacattgaatatgtcaaatgcccgtggttacagtgtgggcggtactattcgcatcgtgattaataaccaaattggttttacgacatctaatccgaatgacacgcgctctacagaatattgcaccgatattgcaaaaatgattcaagcgccgattattcatgttaatggcgatgatcctgaagcggtggcatttgctgcgcgtatggcggtggaatatcgtaatttattcaaacgagatatttttattgatttgatttcttatcgtcgccatggtcataacgaggcagatgaaccattagccactcaaccaatgatgtatagcatcatcaaaaaacatcctacacctcgtaaagtttatgcggatcgcttagtttcagaaggcgtgatgactgaagaacaagtcaccgagatggcgaatgattatcgcgatgcgctagataatggcgatcgcgtcgtatcagaatggcgagaaatggatacggcaaaaatggattggttgcaatatctcaattatgattggactgcgccgtatgaaagcaaattttcacaggaacgttttttaacccttgctaaacgtgtatgtgaatatccagaaagtttacgcgcgcatcctcgcgtagaaaaaatctataatgatcgtaaagcaatgtatcaaggcgaaaaattgctcgactggggtatggctgaaaccatggcttatgcaaccttacttgatgaaggtgttaatgttcgtttatcaggtgaagatgcggggcgtggaacctttttccatcgtcatgccgttgtgcataatcaaaatgatggtacggggtatgtaccattaacacatttgcatgctaatcaaggtcgttttgaagtatgggattcggtactttctgaagaatctgttcttgcttttgaatatggttatgcgacgacggatccaaaaactttaaccatttgggaagcgcaatttggcgattttgctaatggtgcacaaattgttattgaccaatttattagctctggcgaacaaaaatggggcagaatgtgtggtttagttatgttattgcctcatggctatgaggggcaaggccctgaacattcttccgcacgtcttgaacgttatttgcaactttgcgcagaacaaaatatgcaagtttgcgtgccatcaacaccagcacaggtgtatcacatgttgcgccgccagtctttacgtaaaatgcgccgtccattgattgccatttccccaaaatctttactacgtcatccattggcagtgtccagtttagacgagttgattaatggaactttccaaacggtaattggagaaattgacgagcttgatcctaaagatgtaaaacgtgtggtaatgtgttcaggtaaagtttattatgatttacttgaacaacgtcgtgcaaataatcagaaagatgtagcgattatccgcattgagcagctttatccattcccgcatgaggatgtgaagaaagcgcttgagccttatgcgcatgtcacggattatgtatggtgccaagaagaaccacttaaccaaggggcttggtattgcagcaaacataattttgaatcagcaattccagaatccgttaaactcaaatatgcagggcgtccagcttctgcttcgcctgctgtgggctatatgtcgcttcacactaaacagcaaaaacagttagtggaagatgcgttgagtctttaa

SEQ ID NO: 3464 - protein, 935 aa, Haemophilus influenzae
MQQNKAFDDWLASTALGGANQSYIEELYESYLSDPQSVEESWRKTFDSLPKTTALEQPHTPVRDYFRRLARENHNEAVTVIDPAAGAKLVKVLQFINAYRFRGHLEANLDPLNYYRWKVSSVPELDYRHHGFTEQDLNETFNINHYVYKRDTIKLGELAQMLKETYCGSIGLEFMHVQDMEQKIWLQSKMESLLDKPIFTSEERVNFLRELTAADGLERYLGAKFPGAKRFSLEGSDAFIPLMKEIIRHSSRQGVNDVVMGMAHRGRLNMLVNVLGKKPENLFDEFAGKHSSERTGDVKYHQGFSSDFAVDDKRVHLTLAFNPSHLEIVSPVVIGSVRSRQTRMNDTEHSKVLAITVHGDSAVAGQGVVQETLNMSNARGYSVGGTIRIVINNQIGFTTSNPNDTRSTEYCTDIAKMIQAPIIHVNGDDPEAVAFAARMAVEYRNLFKRDIFIDLISYRRHGHNEADEPLATQPMMYSIIKKHPTPRKVYADRLVSEGVMTEEQVTEMANDYRDALDNGDRVVSEWREMDTAKMDWLQYLNYDWTAPYESKFSQERFLTLAKRVCEYPESLRAHPRVEKIYNDRKAMYQGEKLLDWGMAETMAYATLLDEGVNVRLSGEDAGRGTFFHRHAVVHNQNDGTGYVPLTHLHANQGRFEVWDSVLSEESVLAFEYGYATTDPKTLTIWEAQFGDFANGAQIVIDQFISSGEQKWGRMCGLVMLLPHGYEGQGPEHSSARLERYLQLCAEQNMQVCVPSTPAQVYHMLRRQSLRKMRRPLIAISPKSLLRHPLAVSSLDELINGTFQTVIGEIDELDPKDVKRVVMCSGKVYYDLLEQRRANNQKDVAIIRIEQLYPFPHEDVKKALEPYAHVTDYVWCQEEPLNQGAWYCSKHNFESAIPESVKLKYAGRPASASPAVGYMSLHTKQQKQLVEDALSL

SEQ ID NO: 3465 - DNA, 639 bp, Haemophilus influenzae
atgaatatcgaaattatccctgttaccgcatttcaacaaaattgttctttgatttgggatgatgacaaaaatgccgcaattattgacccgggtggcgaagccgaacgcctaattcaacgcattgaagaactggatttaaatctcaaagtgattttgattacccatggccatttagatcacgttggtgctgcaatgcaattaaaacaacattttggcgttgaaatttggggttctaatgaaaaagataaatttttatttgagagtttacccgagcaaacccaacgttttggcttgccaaatattgacgcttttttacctgatcgttggtttaatcaagaaggtgaaattttaaaattagatggctttaatttcgagattttacatttaccagggcatacacctgggcatattggtttcattgaacacgagaaaaaagtggcatttacaggcgatgtattatttcaaggcggaattggtcgtaccgatttccctcgcggggattatgaaacattgatttcttcaattcgaacaaaattactcccattaaatgacgatattattattatcgctggacacggatcttacacaaccattgggcaagaaaagcggagcaatccatttttaaatcctaaatcctaa

SEQ ID NO: 3466 - protein, 212 aa, Haemophilus influenzae
MNIEIIPVTAFQQNCSLIWDDDKNAAIIDPGGEAERLIQRIEELDLNLKVILITHGHLDHVGAAMQLKQHFGVEIWGSNEKDKFLFESLPEQTQRFGLPNIDAFLPDRWFNQEGEILKLDGFNFEILHLPGHTPGHIGFIEHEKKVAFTGDVLFQGGIGRTDFPRGDYETLISSIRTKLLPLNDDIIIIAGHGSYTTIGQEKRSNPFLNPKS

SEQ ID NO: 3467 - DNA, 756 bp, Haemophilus influenzae
atgttatttgacagccatcttcatttagaccaactctctgacgagaatattcagcaaacacttgctcattcaaagattataggtatgcttgcggtgagtactaatctcaacagtgctaaaaaactgctgaatttaaaacagacttacccaaagaaactttatattgcagctggttttcatcctgaacagcaattacctagtttagaagaacaaaaagaattatttcaatggattgacgaacattattccttaatttctgccattggcgaggtggggttaccacattattctaaacgagaaaatccgaatttagattacgtgccttatattgaattactggagcgatttattctgatagcgaaaaaatgggatttaccgttaaatttgcatattgtacataacgatgtagaaattgcccttgaattattgcagaaacacaaaattcagcgggctcactttcactggtttaagacagatgaaaaatcttttcagaaatttttctctaccccctattttgcaagcctaacccctgatattttatggaaccctaaaacccaatatgtcgcacaacatttacccttaaatcgcttgatgattgaaacggatagcccttggcaacacgagggatttgaacgtgcgggcatttctgaacaattattggctgtattgcaaaaactagctgaattaaagtctttgccattacattctgttcaaaagcaaatccttttgaatactcaacagttttatcgattataa

SEQ ID NO: 3468 - protein, 251 aa, Haemophilus influenzae
MLFDSHLHLDQLSDENIQQTLAHSKIIGMLAVSTNLNSAKKLLNLKQTYPKKLYIAAGFHPEQQLPSLEEQKELFQWIDEHYSLISAIGEVGLPHYSKRENPNLDYVPYIELLERFILIAKKWDLPLNLHIVHNDVEIALELLQKHKIQRAHFHWFKTDEKSFQKFFSTPYFASLTPDILWNPKTQYVAQHLPLNRLMIETDSPWQHEGFERAGISEQLLAVLQKLAELKSLPLHSVQKQILLNTQQFYRL

SEQ ID NO: 3469 - DNA, 561 bp, Haemophilus influenzae
atgaattatgtggatcagaataaacgaaaatggttatcgctgggcggtattgcgttaggaatatctattttaccaaattctgtattagcaatggtttcaacacctaaacctcgtattttaactttccgcaacattaatacgggcgaaagattaagtggagagttttctttagcaaaaggtttttcgcctgcgatgttaaaaaaattggattatttaatgcgtgataaaaggacaaatcaagtgcataaaatggatccaaatttattccagaaattttataatatccaaactaatttaggcttacgcaatgctgaaattgaagtaatttgtggttatcgttcagccgctactaatgcaatgcgtcatcgccaaagtcgtggcgtagcgaaaaatagttatcacattaaaggaaaagccattgattttcgtattgcagatgtgcctttgattaaagtgaaatcttctgcggaaagtctgcgaaatggtggcgtgggttattatccaaccagtaatttcattcacgtagatacaggccctgtgagaacttggaaaggcgtgtaa

SEQ ID NO: 3470 - protein, 186 aa, Haemophilus influenzae
MNYVDQNKRKWLSLGGIALGISILPNSVLAMVSTPKPRILTFRNINTGERLSGEFSLAKGFSPAMLKKLDYLMRDKRTNQVHKMDPNLFQKFYNIQTNLGLRNAEIEVICGYRSAATNAMRHRQSRGVAKNSYHIKGKAIDFRIADVPLIKVKSSAESLRNGGVGYYPTSNFIHVDTGPVRTWKGV

SEQ ID NO: 3471 - DNA, 1470 bp, Haemophilus influenzae
atggtagtgtttaaaagcaccttaaagttatcattattcgccttatcattatctatgatgatgtcgggttgtgttttagtaggtttgagcaaaaatgaccaatctaaatcattgtacggcattaatctttcccatttgtcactcgcagaaagaaaagagcttgaagaagccatttatgcggatcagcaacgtttaacggaagaaaaacaaacattgcttaatatgacgctaacacacgaaataggcgatcataagttacaatttaagcctttactcgcgcgtttatatgcttttcgtaaatatgccccgttatggactgacaatgcggcagctcgtcaattgttacgtgattatgcggcaatggtggcaagcggtatttcaaaatcgtcggcaacttcactagaaacattggcattggtagaacaacaaggcggattggtttatgatgtgttattaagtgatattttgttagattacttatattacacacaaaatgttcgttctcaagcatctaattggttgtattcatctgctcagtatcaagcacaacagcctgaaaatgatcatattcaacgctggttaagtgcggtggaaaataatcaacttcttgatttcatacaaagtttagcgggagaaaatcatttatatcgccaaacagttcaatcattgccgatgtttattccgacttctaaagaatcaaatattgctcaaaaattggcaatgaatgcacagcgtttacgtgtgattcctgattttcataatggaatttttgtgaatattccaagctataaattacagtattatcgtgatggcgatttaattttagaatctcgggtaattgttggcacaaattcgcgcaggacacctgtaatgtatagcaaattaagtaatgtggttgtaaatccaccttggaatgcgccaattcgcttaattaatgaagatttattgccaaaaatgaaagccgatccaaattatattacggagcataattattcaattttagataatcaaggcaatgttgttgatcctgcttctattgattgggaatctattggtaataaatttccttatcgagttcgacaagcggctggcgatagtgcgttaggtaattataaatttaatatgccaagttctgatgcaatttatttacatgatacgccaaatcgcggattgtttaatcgtaaaaatcgagcgttaagttctggttgtgtgcgtgttgaaaaatctgatcaattggcaagtattttattaaaagaagcaggttggacagaaactcgaaaaaatacagtattagcaagtaaaaaaaccacttctgcgccaatacgctcggataatcctgtttttttatattatgttactgcgtggattgaaaacggaaatattgtaaatttacctgatatttatggttatgatcgtcagattaatcttgctgagattaattgggatctcgtaaaaaaatatcttcaataa

SEQ ID NO: 3472 - protein, 489 aa, Haemophilus influenzae
MVVFKSTLKLSLFALSLSMMMSGCVLVGLSKNDQSKSLYGINLSHLSLAERKELEEAIYADQQRLTEEKQTLLNMTLTHEIGDHKLQFKPLLARLYAFRKYAPLWTDNAAARQLLRDYAAMVASGISKSSATSLETLALVEQQGGLVYDVLLSDILLDYLYYTQNVRSQASNWLYSSAQYQAQQPENDHIQRWLSAVENNQLLDFIQSLAGENHLYRQTVQSLPMFIPTSKESNIAQKLAMNAQRLRVIPDFHNGIFVNIPSYKLQYYRDGDLILESRVIVGTNSRRTPVMYSKLSNVVVNPPWNAPIRLINEDLLPKMKADPNYITEHNYSILDNQGNVVDPASIDWESIGNKFPYRVRQAAGDSALGNYKFNMPSSDAIYLHDTPNRGLFNRKNRALSSGCVRVEKSDQLASILLKEAGWTETRKNTVLASKKTTSAPIRSDNPVFLYYVTAWIENGNIVNLPDIYGYDRQINLAEINWDLVKKYLQ

SEQ ID NO: 3473 - DNA, 2082 bp, Haemophilus influenzae
atgaaatttaaaatgtcaaaaaatgtgatttgttatgcgtggttatcggtgtgtttgagcagtgcaattcctgcatttgctgtacaacctacattaaaaccaagtgacattagtattccagcgataagtgaagaaagccagttggcaactaagcgtgcaacgacaagattaactcaatcccattatcgtaagattaaattagatgatgatttttccgagaaaatttttgatcgttatattaaaaatttagattttaaccacaatacttttttgcagtctgatatagacgaacttcgtcaaaaatatggtactaagttagatgaacagttgaatcaaggcgatctttctgcggcgtttgacatttatgatgtaatgatgaaacgtcgctatgaacgttatacttatgcgttatctttattagataaagagcctgatttaaatggtcaagatcaaattgaaattgatcgtgaaaaagcggctgcaccacaaactgaagctgatgcgaataaactttgggatgctcgcgtaaaaaatgacattattaatcttaaattaaaagataaaaaatggtcagaaatcaaagcaaagcttacaaaacgctataatttagccattcgtcgtttaacgcaaacaaaagcagacgatattgttcaaatttatttgaatgcttttgcgcgtgaaattgatcctcacaccagttatctttccccaagaacagcaaaaagttttaatgaaagtataaatctttctttggaaggcattgggactactttacaatcagaagatgatgaaattagcatcaaatctcttgtacctggtgcgccagcggaacgtagtaaaaagctgcatcctggggataaaatcattggtgttgggcaagcaacaggcgatattgaagacgttgttggttggcgtttagaagatttggtagaaaaaattaaagggaaaaaaggcactaaagttcgcttagaaattgagcctgctaaagggggaaaatcacgtattattactttggttcgtgataaagtccgtattgaagatcaagcggctaaactaacctttgaaaaagtgtcaggaaaaaacattgcggtaataaaaattccaagtttttatattggattaaccgaagatgtcaaaaaactactggttaaattagaaaatcaaaaagctgaggctcttattgttgatttacgtgaaaatggcggtggtgcattaacggaagcggtggcgttaagtggtttatttattgccgatggccctgttgtgcaggttcgcgatgcttatcagcgtattcgtgttcatgaagatgatgatgctacgcaacaatataaggggttattatttgtgatgattaatcgttacagtgcttccgcatcagaaatttttgctgcagcaatgcaagattatcgtcgaggtattatcatcgggcaaaatacttttggtaaaggtacggtgcagcagagtcgttcgttaaattttatctatgatttagatcagagtccgttgggtgttttgcaatatactattcaaaaattttatcgcgttaatggtggttcaacccaattaaaaggtgttgcagccgatattaattttcctgaaattatagatgcgaaagaatatggggaagataaagaagataatgcgcttgcttgggataaaatcccatcagcgagttatatggaagtaggaaatatcgattatattgataatgcagtaaatattctaaatgaaaaacatcttgctcgtattgctaaagatcctgaatttgttgcattgaatgaagaattgaaagtgcgaaatgaacgccgagatcgaaaatttctatcattgaattataaaatgcgtaaagcagagaatgataaagatgatgcaagacgtttaaaagatttgaacgaacgttttaaacgtgagggtaagaaagcattgaaagatattgatgatttgccgaaagattacgaagcaccagatttcttcttaaaagaagctgaaaaaatggcagctgatttcgttatttttaattcagatcagaaaattaatcaagcaaacggcctatccgaagcaaaaacggaaagtaaaaaataa

SEQ ID NO: 3474 - protein, 693 aa, Haemophilus influenzae
MKFKMSKNVICYAWLSVCLSSAIPAFAVQPTLKPSDISIPAISEESQLATKRATTRLTQSHYRKIKLDDDFSEKIFDRYIKNLDFNHNTFLQSDIDELRQKYGTKLDEQLNQGDLSAAFDIYDVMMKRRYERYTYALSLLDKEPDLNGQDQIEIDREKAAAPQTEADANKLWDARVKNDIINLKLKDKKWSEIKAKLTKRYNLAIRRLTQTKADDIVQIYLNAFAREIDPHTSYLSPRTAKSFNESINLSLEGIGTTLQSEDDEISIKSLVPGAPAERSKKLHPGDKIIGVGQATGDIEDVVGWRLEDLVEKIKGKKGTKVRLEIEPAKGGKSRIITLVRDKVRIEDQAAKLTFEKVSGKNIAVIKIPSFYIGLTEDVKKLLVKLENQKAEALIVDLRENGGGALTEAVALSGLFIADGPVVQVRDAYQRIRVHEDDDATQQYKGLLFVMINRYSASASEIFAAAMQDYRRGIIIGQNTFGKGTVQQSRSLNFIYDLDQSPLGVLQYTIQKFYRVNGGSTQLKGVAADINFPEIIDAKEYGEDKEDNALAWDKIPSASYMEVGNIDYIDNAVNILNEKHLARIAKDPEFVALNEELKVRNERRDRKFLSLNYKMRKAENDKDDARRLKDLNERFKREGKKALKDIDDLPKDYEAPDFFLKEAEKMAADFVIFNSDQKINQANGLSEAKTESKK

SEQ ID NO: 3475 - DNA, 639 bp, Haemophilus influenzae
atgactgacacacaattatcatctcaagttacagatgtgcaaacggaagtgcaaaaattaaccaacgcaaaagctatcattacttatttagcagaaaaatttcctctttgctttgttttagagggtgaagcaaaaccattaaaaataggtttatttcaagatttagctgaagcattacaagatgatgaacgcgtaagtaaaacccaattgcgtcaggctcttcgccaatacacatcaaattggcgttatttatatggctgtcgtgaaggtgcagtgcgtgttgatttacagggtaatcctgcgggtgtattagatgcagaacacgttgctcacgctgcacagcaacttgctgaagcgaaagcacgttttgcggaaaaacgtaaagcagaagccgcagctaaaaaagcacaacaaaaaaagcatctgcgtaaaccagcgaataaaaaccttaaaaaagagagtaaattatcactaagtgcggttgatttttcacaaatttctgttggttctgttgtgaaagttaaagctggagataatgctaaaaaagcaacagtggtagaagtattaaaagattcagcacgtgttgaacttgaaaacggtttgattatgaacgttgctgcagatcgtttatttgcttaa

SEQ ID NO: 3476 - protein, 212 aa, Haemophilus influenzae
MTDTQLSSQVTDVQTEVQKLTNAKAIITYLAEKFPLCFVLEGEAKPLKIGLFQDLAEALQDDERVSKTQLRQALRQYTSNWRYLYGCREGAVRVDLQGNPAGVLDAEHVAHAAQQLAEAKARFAEKRKAEAAAKKAQQKKHLRKPANKNLKKESKLSLSAVDFSQISVGSVVKVKAGDNAKKATVVEVLKDSARVELENGLIMNVAADRLFA

SEQ ID NO: 3477 - DNA, 1248 bp, Haemophilus influenzae
gtgcctaaaacaaagctaacttcgcctccatttaaaattttaaaatgcacagaatgtgatgcttgcattaacgtgccttctattcttcaatcaaatgaacaagccgaatgcccacgttgtcatcatctattagaaagtggtacgaggtggtcattacatcgttgtgcaatgattgcattatctattttgatattaatgcccttttccttgaactaccccttattaagtttacatttattgggtattaaaattgatgcctctatttgggatggcatttggaaaatggcagtgggtggttatgaatacactgcgtttatgatctttatttgtgcagtagtaatgccgattacgtttgcacttttagtgattatgctttggctggctaagatttttcagataaaacctcgtagtgttttactatttcttggttacattaaagcttgggtaatgtttgatgtttatttagtggcactcggagtaaccatatttaaagtacgcgaatatgcaacattagaaattaatatttatttaattccttttatttttaccgcacttttaactacgctgctttttatcaaacttaatctttccgccttatggcaggaattttatcctgaatgcacttcagtttatacaaaacaagctgttgaattatgtcctgcttgccattacacctttacgcaaaaatctatctattacgatcatcaaaaaatttgttgtccccgctgccaatcgcctcttaatacatcggataagctaaaattacaagcaacttgggcaaccttaattgcagggattattatgctttttcctgcaaatttattacctatatctggcatttatttaacaggcgcattatctgaagatactttaatttctggggttatttcatttgttaaatcaggtagttattttgttgcttttgttgtattttttgccagtattttcgtgcctatcagcaaaatttttattatgctttacttacttgcttgcgtgcattttaaatggcaacattctattaaatggcaaatgcgtttattgcatctagtacattttgttggacgctggtctatgcttgatttatttgtattagccttaatgatgtcgcttgtcacacgcggagaaatcattaattttaccgtagggccaggcgcattttattttggtgcagccgtattttgcacgatgctttccacctcacaatttgatagcaaattaatttggaaaatttatgacagagaaaaataa

SEQ ID NO: 3478 - protein, 415 aa, Haemophilus influenzae
MPKTKLTSPPFKILKCTECDACINVPSILQSNEQAECPRCHHLLESGTRWSLHRCAMIALSILILMPFSLNYPLLSLHLLGIKIDASIWDGIWKMAVGGYEYTAFMIFICAVVMPITFALLVIMLWLAKIFQIKPRSVLLFLGYIKAWVMFDVYLVALGVTIFKVREYATLEINIYLIPFIFTALLTTLLFIKLNLSALWQEFYPECTSVYTKQAVELCPACHYTFTQKSIYYDHQKICCPRCQSPLNTSDKLKLQATWATLIAGIIMLFPANLLPISGIYLTGALSEDTLISGVISFVKSGSYFVAFVVFFASIFVPISKIFIMLYLLACVHFKWQHSIKWQMRLLHLVHFVGRWSMLDLFVLALMMSLVTRGEIINFTVGPGAFYFGAAVFCTMLSTSQFDSKLIWKIYDREK

SEQ ID NO: 3479 - DNA, 2646 bp, Haemophilus influenzae
atgacagagaaaaataattcctcctcaatagaagaaaaatatcaagaaataacggcgaacttacgtaaaacaaaacgcatttcgcctttttggctattgccttttatcgcattatgtatcggggcaattttattcttccaaattgtgaaagaacgtggtactagcattacgattacttttgctaatggttcaggtatcgttgcggataaaactcaaattcgttatcaaggattacaaattggcatagtaaaagaagttcatttcactgataacctgcaaaaagtggaagttgtagccaatatcaatcctgaagcatcaagtattttgcgtgaaaatacaaaattttggcttgtgcaaccaaatgtttctcttgctggcatttcaggattagattctctcgtgtcaggtaattacattactcttcaaccaggtgatggcgatcgtgaagatgaatttatagcagaagaacaaggccctattgcacaagtttccgcaggagatttattgattcacttaatttctgatgatttaggttcgatttctattggtgcatctgtgtattttaaaaaattacctgtaggaaaaatctatgattaccgtattaataaaaacaataaagtagaaatagatgtggtcattgataaagcctatgccaagtttgtgaaaaaagattcacgcttttggaatattagtggcattaacgcgaacattagcccatcaggcttaaacctaaatgtagaaagtttaaatgccgttgtacagggggcggtttcttttgactctccagctgacagcccaaaagcagatgaaaatagtcatttcacgctctataccaatttaaaagcggctaaacgtgggattgaaattaaggtaacaattcctgcctcatccgctcttattgcagggcaaacggaagtttattctcaagataatgctatagggattctcgccaagctaagtgcggtagaaaataacgatgaaattttagaaggcagtttattgatagatccaaaccaagcctctttgtttaaagcgaatagcaaaattgtcctacgcaataaaaaaatagatcttggcaatttagcagaacccaaaaaattctttcgtggcgaatattttgatgtgattgcgggagacggcgaaactaaacatcaatttaacgtgattaaagaaaatgaattattactcaatgcgcctaacacgttagttttaaccctcactgcgccagaaaattatggtgtaagcgaagggcaaaatgtgttttataacaatatgataattgggcaaattgtttcacaaacaatagatgtaaatggcgtacaatttaaagcagcaattgcctctgaataccgcaatttaattcacgaagatacacaatttgtggcagcaaccaattttgatataagcgttggattagatggattgcgttttgaatctgcgacgccagaaaaatggttacaaggcggcgttcgagtcctaacaaaacaagctttgggaaaagctaaaaccagttatccgctttatcaaaatatcagcaatgctgaacatggcatcacaggaaatattcttacgccaacgataaccttacacacccaaaccttaccaagcattgataaaggctctcttgtactatatcgccaatttgaagtgggaaaaattttaagtattaaacctaaaacaaataactttgatgtagacatttatatttatcctgcttatcaacatttattgacagataaaagccgtttttgggtagaaagtgcggcaaaaatagatgtaagtccaaaaggcattagtattcaagcaacgccacttgcacgttccttaaaaggggcgattagctttgataatggcggttcaggcaataatcgaacactttatgcaaatgaaagttatgcaaaatccattgggtttgtaattacattaatcacagatgatgcaactaatcttagcaaaggaatgaatctgcgctatcttggtttagatgtggggcaaattgacagtattcagcttgatgcaaaagcaaaacgcattactgcaaaagccctaataaatccaaattatatgaatataattgcaaaagaaggggctaactttacgataatctcgccacaaatttcggcaggtggaatagataaccttgatagtttattacagccttatattgatattgaaattggtaatggaaacacaaaaacacaatttaatttagcgcaaacggcaccacaacgtaataaatttagcaatggcacgccgtttattttagaaacgcgtgatgcgatgaatttaagtgaaggttcgccaattctttatcgaggtgtagaagttggcacagtgaagaaatttgaacttaatagtcttggtgatcgtgtgttagtgcatattgccattatgccgaaatatagccatcttgttcgacaaaacacagaattttggatcgcatcaggctacgactttagcttaggctggaaaggtgcggtatttaatacgggtagcgttcagcagttgctaaaaggtgggatttctttctccacaccagcagaaaaagaaattcaaccgcaagcgcagcccaacaaacgtttcttgcttcaaataaaccgccctgaagaagtgcaaacttggggaagtggcgcgttatcaaaataa

SEQ ID NO: 3480 - protein, 881 aa, Haemophilus influenzae
MTEKNNSSSIEEKYQEITANLRKTKRISPFWLLPFIALCIGAILFFQIVKERGTSITITFANGSGIVADKTQIRYQGLQIGIVKEVHFTDNLQKVEVVANINPEASSILRENTKFWLVQPNVSLAGISGLDSLVSGNYITLQPGDGDREDEFIAEEQGPIAQVSAGDLLIHLISDDLGSISIGASVYFKKLPVGKIYDYRINKNNKVEIDVVIDKAYAKFVKKDSRFWNISGINANISPSGLNLNVESLNAVVQGAVSFDSPADSPKADENSHFTLYTNLKAAKRGIEIKVTIPASSALIAGQTEVYSQDNAIGILAKLSAVENNDEILEGSLLIDPNQASLFKANSKIVLRNKKIDLGNLAEPKKFFRGEYFDVIAGDGETKHQFNVIKENELLLNAPNTLVLTLTAPENYGVSEGQNVFYNNMIIGQIVSQTIDVNGVQFKAAIASEYRNLIHEDTQFVAATNFDISVGLDGLRFESATPEKWLQGGVRVLTKQALGKAKTSYPLYQNISNAEHGITGNILTPTITLHTQTLPSIDKGSLVLYRQFEVGKILSIKPKTNNFDVDIYIYPAYQHLLTDKSRFWVESAAKIDVSPKGISIQATPLARSLKGAISFDNGGSGNNRTLYANESYAKSIGFVITLITDDATNLSKGMNLRYLGLDVGQIDSIQLDAKAKRITAKALINPNYMNIIAKEGANFTIISPQISAGGIDNLDSLLQPYIDIEIGNGNTKTQFNLAQTAPQRNKFSNGTPFILETRDAMNLSEGSPILYRGVEVGTVKKFELNSLGDRVLVHIAIMPKYSHLVRQNTEFWIASGYDFSLGWKGAVFNTGSVQQLLKGGISFSTPAEKEIQPQAQPNKRFLLQINRPEEVQTWGSGALSK

SEQ ID NO: 3481 - DNA, 453 bp, Haemophilus influenzae
atgacagatattcaaattgcggtacaagaacagccttttgatcaaaatgccgtttatcaatggctttctgagcaacattcaattggtgcaacggttatttttgtgggtaaagtacgcgatcttaatttaggcgatgcagtatctagtttgtatttagaacattatcccgcaatgactgaaaaagcgttgaatgaaattgttgcacaagcgaaagctcgttgggatattcaacgtgtatcggtaattcatcgtgttgggcttttacaaactggcgatgaaattgttttagtgggggtaagttccgcacatcgtggagatgcttatcacgccaatgaattcatcatggattttttaaaatctaaagcaccattttggaaaaaagaacaaaccaatcaaggcgagcgttggattgaagcaagagagagtgataaagaagcattagaaaaatggtaa

SEQ ID NO: 3482 - protein, 150 aa, Haemophilus influenzae
MTDIQIAVQEQPFDQNAVYQWLSEQHSIGATVIFVGKVRDLNLGDAVSSLYLEHYPAMTEKALNEIVAQAKARWDIQRVSVIHRVGLLQTGDEIVLVGVSSAHRGDAYHANEFIMDFLKSKAPFWKKEQTNQGERWIEARESDKEALEKW

SEQ ID NO: 3483 - DNA, 246 bp, Haemophilus influenzae
atgttaaatgttttattttttgctcaaactcgtgaattaattggcattgatgccattcaattagaagatgattttgccactgcggaagcggtgcgtgaacaccttactcaaaagggcgataaatgggcattggcactggaaaaaggtaaacttttagtggcaattaatcaaaccttaatgcctttagaaagtgcggtaaaaaatggcgatgaaattgcctttttcccaccagtaacagggggctaa

SEQ ID NO: 3484 - protein, 81 aa, Haemophilus influenzae
MLNVLFFAQTRELIGIDAIQLEDDFATAEAVREHLTQKGDKWALALEKGKLLVAINQTLMPLESAVKNGDEIAFFPPVTGG

SEQ ID NO: 3485 - DNA, 441 bp, Haemophilus influenzae
atggtggatgtttctgctaaagcggaaactgttcgtgaagctcgtgctgaagccattgtaactatgtcaaaagaaactctttccatgatcgtggaaggtaaacatcacaaaggcgatgtatttgctactgctcgtattgcaggtattcaagcggcaaaacgcacttgggaacttatcccgctttgccatcccttattactttctaaagtagaagtgaatttagaaccgttacttgaaagcaatcaagttcgcattcaatctctttgcaaattaactggaaaaactggcgtagaaatggaagcactaactgcggcaagcgtagcagccttaaccatttacgatatgtgtaaagctgtgcagaaagacattgtgattgagaaagttcgcttgttagaaaagagcggtggaaaatcaggccattttattgcggaggaaaaataa

SEQ ID NO: 3486 - protein, 146 aa, Haemophilus influenzae
MVDVSAKAETVREARAEAIVTMSKETLSMIVEGKHHKGDVFATARIAGIQAAKRTWELIPLCHPLLLSKVEVNLEPLLESNQVRIQSLCKLTGKTGVEMEALTAASVAALTIYDMCKAVQKDIVIEKVRLLEKSGGKSGHFIAEEK

SEQ ID NO: 3487 - DNA, 1014 bp, Haemophilus influenzae
atgcaatctattcctatcaagaacgtaggagagtctcgcttagtcgatcctttccaacgtcaatattactatctacgactgtcgattaccgatcagtgtaattttcgttgtacctattgtttacctgatggttatcaacccgaagctaacaaaccgagtttcttaaccttaaaagaaattacccatcttgctcaagcctttgctgaaatgggcacagagaaaatccgtttaacgggtggcgaaccgactttacgcaaagattttatttctattgctgaaagcattgctaatattgatggcattcgtcaattagccgtcacgacaaacggctatcgcatggcaaaagatgtggctgattggaagcaagcagggattacgtctattaacgtcagtgttgatagccttgatcccaaaatgttccatcaaattacaggtatcaataaatttgatgacgtgatgcgtggtatcgatcgtgcatttgaagtgggctacaacaaagtcaaagttaattcagttttgatgaaaaatctgaatgataaagaatttgaacaatttctcgcttgggttaaagatcgcccaattcaaatgcgctttattgagttgatgcaaacgggcgaaatggatagtttctttgataaattccatctttctggacaaatcttagccgataaattgctgaaaaatggttggacattacagcataaatctcacactgatggccctgctaaagtctttacgcattctgattatgcaggcgaaattggtttaattatgccttatgaaaagaatttctgcgcaagttgcaatcgtttaagagtgtcagcaaaaggtaaacttcatctttgtttatttggcgaagaaggcattgaattacgtgatttattacagtcgcacgaacagcaaggtattttacaggctcgtatttttgccgcacttcaaggcaaacgtgaacatcattatttgcatatcggcgatactggtgtaagaaatcatttagcgtctattggtggctaa

SEQ ID NO: 3488 - protein, 337 aa, Haemophilus influenzae
MQSIPIKNVGESRLVDPFQRQYYYLRLSITDQCNFRCTYCLPDGYQPEANKPSFLTLKEITHLAQAFAEMGTEKIRLTGGEPTLRKDFISIAESIANIDGIRQLAVTTNGYRMAKDVADWKQAGITSINVSVDSLDPKMFHQITGINKFDDVMRGIDRAFEVGYNKVKVNSVLMKNLNDKEFEQFLAWVKDRPIQMRFIELMQTGEMDSFFDKFHLSGQILADKLLKNGWTLQHKSHTDGPAKVFTHSDYAGEIGLIMPYEKNFCASCNRLRVSAKGKLHLCLFGEEGIELRDLLQSHEQQGILQARIFAALQGKREHHYLHIGDTGVRNHLASIGG

SEQ ID NO: 3489 - DNA, 672 bp, Haemophilus influenzae
atgtcttttgcccaacaaaaacttagcgaactcgctgtttcaattccaggtgcaactaaaatttttcgtgaatatgatttagatttttgctgcggaggttctgtattattagaagtcgcagcacaacaaaagaatcttaaccttgctgaaattgaaaaacgtttaactgatttacaacaaagtaaagcagaaaataatgataaagattggacttcggcatcttatgcggagatgatcgatcacattattactcgttttcataatcgccaccgtgaacaactcccagaattaattacattagcggagaaagtagaaaatgtacatgctgatcgtgatgactgtcctataggcgtaaccgcacaattagaaaaaatttatgctgaacttagccagcatttaatgaaagaagaacaaattttgttcccaatgatcaaaatggggaattatgctatggcctcaatgccaattcgtgtaatggaaatggaacacgatgaagcaggacaagatgtggaagtgatcaaatcccttactaataactgcacgctaccagcagatgcttgtttcagttggaaagccttatatagcggtattaatgaatttattgatgatttaatgcaccatattcatttggaaaataatattttatttccacgtgtattaaacgaaaaataa

SEQ ID NO: 3490 - protein, 223 aa, Haemophilus influenzae
MSFAQQKLSELAVSIPGATKIFREYDLDFCCGGSVLLEVAAQQKNLNLAEIEKRLTDLQQSKAENNDKDWTSASYAEMIDHIITRFHNRHREQLPELITLAEKVENVHADRDDCPIGVTAQLEKIYAELSQHLMKEEQILFPMIKMGNYAMASMPIRVMEMEHDEAGQDVEVIKSLTNNCTLPADACFSWKALYSGINEFIDDLMHHIHLENNILFPRVLNEK

SEQ ID NO: 3491 - DNA, 936 bp, Haemophilus influenzae
atgaactatctaaaaattgcacaggattccctttcagtggaaagtaacgcacttttgcaactcagccaacgcttaggcgacgattttaatcaagtcatcgatcttattttagcctgcgaaggacgattagtcatcggcgggatagggaaatctggtttaatcggtaaaaaaatggtggctacctttgcctctacgggtacaccaagtttctttttacatccaacagaagccttccacggcgatttaggtatgttaaaaccaattgatatcgtgatgttaatttcctatagcggcgaaaccgatgatgtcaataaactgattccaagtttaaaaaatttcggtaataaaattattgctgtgacgagtaacaaaaattccacgctcgcacgccatgcagattatgttttagatataactgttgagcgtgaagtgtgtccaaataatctcgcgccaacaacatccgcacttgtcacgctggcacttggtgatgcactcgccgtatcgcttattacagcacgcaatttccaaccagctgactttgctaaattccatccaggtggcagtcttggtcgtcgtttattatgtaaagtgaaagatcaaatgcaaactcgcctaccaaccattttacccaataccaattttacagattgtctgaccgtgatgaatgaagggcgaatgggcgttgccttagtgatggaaaatgagcaacttaaaggtattatcacggatggcgatattcgccgcgcgcttacagccaatggtgcagaaacgctgaataaaacagccaaagactttatgacaagttcaccaaaaactattcatcaagaagaatttttatcaaaagcagaagactttatgaaagcgaaaaaaattcactcgctagtggttgttaatgatgaaaatcatgtggtgggtttagtggaattttcaagctaa

SEQ ID NO: 3492 - protein, 311 aa, Haemophilus influenzae
MNYLKIAQDSLSVESNALLQLSQRLGDDFNQVIDLILACEGRLVIGGIGKSGLIGKKMVATFASTGTPSFFLHPTEAFHGDLGMLKPIDIVMLISYSGETDDVNKLIPSLKNFGNKIIAVTSNKNSTLARHADYVLDITVEREVCPNNLAPTTSALVTLALGDALAVSLITARNFQPADFAKFHPGGSLGRRLLCKVKDQMQTRLPTILPNTNFTDCLTVMNEGRMGVALVMENEQLKGIITDGDIRRALTANGAETLNKTAKDFMTSSPKTIHQEEFLSKAEDFMKAKKIHSLVVVNDENHVVGLVEFSS

SEQ ID NO: 3493 - DNA, 543 bp, Haemophilus influenzae
atgcaacaaaaattagaaaatattaaatttgtcattactgatgtagatggcgtgctcaccgatggacaacttcattatgatgccaatggtgaagccatcaaaagttttcatgttcgcgatggtttaggcataaaaatgctgatggatgcaggtattcaagtggcagtgctttctggtcgcgactcccctattttacgccgtcgcattgccgatcttggtattaaattatactttcttggcaaacttgaaaaagaaaccgcttgttttgaactcatgaaacaagcaggcgtcactgccgatcagaccgcttatattggcgatgatagcgtagatctccccgcctttgcagcgtgtggaacttcttttactgtggctgatgcccctatttatgtaaagaatactgttgatcatgtactttctactaatggaggaaaaggagcattccgtgaaatgtccgatatgattttacaggcacagggaaaatcttctgtgtttgatagcgcccaaggtttcctgaaatcagtgaaaaatatggagcaatga

SEQ ID NO: 3494 - protein, 180 aa, Haemophilus influenzae
MQQKLENIKFVITDVDGVLTDGQLHYDANGEAIKSFHVRDGLGIKMLMDAGIQVAVLSGRDSPILRRRIADLGIKLYFLGKLEKETACFELMKQAGVTADQTAYIGDDSVDLPAFAACGTSFTVADAPIYVKNTVDHVLSTNGGKGAFREMSDMILQAQGKSSVFDSAQGFLKSVKNMEQ

SEQ ID NO: 3495 - DNA, 2136 bp, Haemophilus influenzae
atgaatattcggttaaatactaaagtaatttctacaatccctgtttttattgccgtaaatattgcggcagtgggaatatggttttttgatatttcttcgcaatcaatgcctttgattctagggatcattgcaggtggtttggtggatttggataaccgtttaactggacgattgaaaaacgtattttttacccttattgccttttctatttcttcctttattgtgcagttacatattggcaagcctatccaatatattgtgttaatgacggtgctgacatttattttcactatgattggtgccgtggggcagcgttatagcaccattgctttcggttcattagtggttgcgctttacaccacattaacttatatcccagaggtaaatgtatggtttattaaccctgtaatgattttatgcggtaccttgctgtatagcgtggtgactctggttgtttacctgtttttcccaaatcgccccgtgcaagaaagtgtcgctaaagcgttttgtgcgttgggcgaatatttagataccaaatcctgcttttttgatcctgacgaagtggctgagattgaaaaaaaacatcttaatttcgcgatgaaaaatgcgaatgttgtcacggcatttaatattgttcgcaccgcgcttttttaccgtattagagggcaacatcgccatcctcgtacccagagaatgttacgttattattttgctgcgcaagatattcacgaacgcaccaattctacgcattttgattatcaacaaataacggaaaaactaaaaaatacagatttgattttccgtattcagcgtttgttagagctacaagcacaatcctgtaaagaaatcacggcgagtttgcgtgaaaataaatcttatcattttaatgaacgtgtcgaacgatcccttttaggcaccttgcattcctttgaactgtatcgaacacaacatcttaatgatcaagatgaactgattgatattcaaaccttgttagataatttacaaagtattaactggcaacttcgccaattagcacaagacacgacggataccgaacaattggctcaaattcatacggaacaaatcactgggttaaaaaatataagtgcggtgatttttagccattttacttttgagtcaccgttgttccgtcatgcggtacgcttatctatagtggtatttttatgttgtgcaattgttgagtttttccaatttaatctgggttattggattttattgaccactatatttgtgtgtcagccaaactattctgcaactaaagtccgtttacgtcagcgtattatcggcacgatattaggcgtagtggtggggtctctattaccttatttaaatccaaccttagaattaaaactgggtcttgtggtgcttacaagtacgctattctttttcttccgcagtaataattacagtttttctacctttttcatcacactacaagttttgctgagttttgatgtgatgggatttgatacggcagccgcattaatgcctcgtttactcgatactttacttggtgccgcgatttcatggtttgccgtatcttacttatggccagattggaaatatttgcaacttgataaagtgagccatcaagcattgcggagtgatgcggtgtatttattgcatattattagtcaattgcaatttggtaaaagtgacgatcttaaatatcgcatagcacgtcgtaatgcacatcaatatgcagccgcactgagtacaacactttctaatatgaataatgagccagtgaaatataaggcatatttacaaaaaggctttgatttgctcaaactgaattattctctattaagctatatttcggctcttggcgcttatcgcgacagaatgaaaaatttgcaacagaccgcacaatttttatctggtttttatcccgtggcaaagaaaattatctataccttagaacacattgaagaaatacccgaagctatttttaaccaacagcaagaaagtatcgaaacacatttaaaagaattggaaaaacaagagatgaccgcagaagaacgagccgtctttagtttaccgtatcagcaattaaatttgattacccaactcttaccgcagttctatgagtattttaggaaagagtcttgttaa

SEQ ID NO: 3496 - protein, 711 aa, Haemophilus influenzae
MNIRLNTKVISTIPVFIAVNIAAVGIWFFDISSQSMPLILGIIAGGLVDLDNRLTGRLKNVFFTLIAFSISSFIVQLHIGKPIQYIVLMTVLTFIFTMIGAVGQRYSTIAFGSLVVALYTTLTYIPEVNVWFINPVMILCGTLLYSVVTLVVYLFFPNRPVQESVAKAFCALGEYLDTKSCFFDPDEVAEIEKKHLNFAMKNANVVTAFNIVRTALFYRIRGQHRHPRTQRMLRYYFAAQDIHERTNSTHFDYQQITEKLKNTDLIFRIQRLLELQAQSCKEITASLRENKSYHFNERVERSLLGTLHSFELYRTQHLNDQDELIDIQTLLDNLQSINWQLRQLAQDTTDTEQLAQIHTEQITGLKNISAVIFSHFTFESPLFRHAVRLSIVVFLCCAIVEFFQFNLGYWILLTTIFVCQPNYSATKVRLRQRIIGTILGVVVGSLLPYLNPTLELKLGLVVLTSTLFFFFRSNNYSFSTFFITLQVLLSFDVMGFDTAAALMPRLLDTLLGAAISWFAVSYLWPDWKYLQLDKVSHQALRSDAVYLLHIISQLQFGKSDDLKYRIARRNAHQYAAALSTTLSNMNNEPVKYKAYLQKGFDLLKLNYSLLSYISALGAYRDRMKNLQQTAQFLSGFYPVAKKIIYTLEHIEEIPEAIFNQQQESIETHLKELEKQEMTAEERAVFSLPYQQLNLITQLLPQFYEYFRKESC

SEQ ID NO: 3497 - DNA, 666 bp, Haemophilus influenzae
atgaaattaggcgctgttgtattaggtcttgccacattatgcacaagtacggcaacctttgctggaatggtttctacgtcatctaaccttgagtttttagcgattgatggtcaaaaagcctctaaatctctcggaaaagctaagacatttactgtagatgatacccaaaaccatcaggttgttgtgcgtttaaatgaaattgttggttcaggatcgaatcaatctctttttgaatctaatcctgtgattgtgacatttcaaggtaatgctgaagatttggttatttccgcaccagttattcgtaatcttgatagtggcgataaattcaatcaaatgccaaatattactgtgaaaacaaaatcaggtaatgctatttcagcgaaagtggatgtgttaaaacaagaaggtttattcccaagtggtaatgtgctaaatgatcttgctgaatataatgcgtctggtgcagcggcatcagtttctaaatttgctgcaacaacagttgcgagttcagtggctgttgcgccagcaggtaatgcaaaagcgaataaaggaaaagtggttgttcagggcgaaaatgttgcagagcaacagctccaatattggttccaacaagcggataaagaaactcaaacacgtttcttaaactgggcaaaatcccataaataa

SEQ ID NO: 3498 - protein, 221 aa, Haemophilus influenzae
MKLGAVVLGLATLCTSTATFAGMVSTSSNLEFLAIDGQKASKSLGKAKTFTVDDTQNHQVVVRLNEIVGSGSNQSLFESNPVIVTFQGNAEDLVISAPVIRNLDSGDKFNQMPNITVKTKSGNAISAKVDVLKQEGLFPSGNVLNDLAEYNASGAAASVSKFAATTVASSVAVAPAGNAKANKGKVVVQGENVAEQQLQYWFQQADKETQTRFLNWAKSHK

SEQ ID NO: 3499 - DNA, 1062 bp, Haemophilus influenzae
atgttgaacgatattttaacaggctatggaatttttattctggaaattttaacaattttattactcattcttgctattgttggtttgattatttcttatcgccaacataacaagtctaaagtgggagaattagaaattaaagatttatcagaagaatttaatgaacaagttcgtttattacgtgattttaatctttctgaagaagaacaaaaacaacgcactaaagctgaaaaaaaagcggaaaaacaaaatgctaaaaaacgcaaagaaaaattgaaaaaaggcgagactttagaagatgaaaagaaagcttgcgtatatgtattagatttttgcggcgatatttcagcctcagaaacaaccgcacttcgtgaagaaatttcagctatcttaaatgtcgccaaatctgaagatgaagtattactacgtttagaaagccctggtggcattgtgcataattatggatttgcagcctctcaattgtctcgcttaaaacaaaaaggcataaaattaaccgttgccgttgataaagtggctgcaagtggcggttatatgatggcttgcgttgccgataaaattgtatccgcaccttttgctgttattggttctattggcgttgtcgctcaaattccaaatgttcatcgactattaaaaaaacacgatgtcgatgtagatgtaatgactgcgggcgaatttaaacgtacagtgaccgtattgggtgagaacactgaaaaaggcaaacaaaaatttcaacaagaattggaagaaacacataaattattcaaacaatttgtctcacaaaatcgcccttgcctagatattgataaaatcgcaacaggcgaacattggtttggacaacaagccattgcattacaacttgtagatgaaatctcaacgagtgatgatttaattttggaaaaaatgaaagaaaaacaggtgcttaatgttaaataccgtttaaaaaaatccctaataaaaaaattcggacgacaagctgaagaaagtgcaattaatatcattcatcgttatagtacaaaacagtctagagactttatgtactaa

SEQ ID NO: 3500 - protein, 353 aa, Haemophilus influenzae
MLNDILTGYGIFILEILTILLLILAIVGLIISYRQHNKSKVGELEIKDLSEEFNEQVRLLRDFNLSEEEQKQRTKAEKKAEKQNAKKRKEKLKKGETLEDEKKACVYVLDFCGDISASETTALREEISAILNVAKSEDEVLLRLESPGGIVHNYGFAASQLSRLKQKGIKLTVAVDKVAASGGYMMACVADKIVSAPFAVIGSIGVVAQIPNVHRLLKKHDVDVDVMTAGEFKRTVTVLGENTEKGKQKFQQELEETHKLFKQFVSQNRPCLDIDKIATGEHWFGQQAIALQLVDEISTSDDLILEKMKEKQVLNVKYRLKKSLIKKFGRQAEESAINIIHRYSTKQSRDFMY

SEQ ID NO: 3501 - DNA, 579 bp, Haemophilus influenzae
atgacgcactatattttattgattatcggcaccgcattaattaacaattttgtattggtaaaattcttaggactttgcccttttatgggtgtatccaaaaaaattgaaacagctgtgggaatgggattagcaacaatgtttgttttaactgctgcttccctttgtgcatatttggtcgatcactatattctaattcccttaaatgccacttttttacgtacattagtgtttattttagttattgctgtagtggtgcaatttaccgaaatggcaataaacaaaacaagtccaacattatatcgtttactcggcattttcttgcctttgataacgacaaactgcgcagtacttggtgtcgcattattaaatgtaaatctcgctcataatttaacagagtctgtcgtttatggttttggtgcatctctcggcttttccttagtattggtactttttgccgcgcttcgtgaacgtttagtcgccgctgatatacctgccacttttcgcggttcatccattgctttaattaccgcaggcttaatgtccctcgcttttatgggatttacaggacttgtaaaataa

SEQ ID NO: 3502 - protein, 192 aa, Haemophilus influenzae
MTHYILLIIGTALINNFVLVKFLGLCPFMGVSKKIETAVGMGLATMFVLTAASLCAYLVDHYILIPLNATFLRTLVFILVIAVVVQFTEMAINKTSPTLYRLLGIFLPLITTNCAVLGVALLNVNLAHNLTESVVYGFGASLGFSLVLVLFAALRERLVAADIPATFRGSSIALITAGLMSLAFMGFTGLVK

SEQ ID NO: 3503 - DNA, 582 bp, Haemophilus influenzae
atgacctttttattcatcgtaattacgctactcgctttaattttcggtgcgattttgggctttgcatcaatcaagctcaaagtggaagctgatcctgtcgtagagaaaattgatgctattttaccgcaaagccaatgtgggcaatgtggttatcctggttgtaagccttatgctgaagccatttgcaatggcgatgaaatcacaaaatgtattccaggtggtcaaacaactatcgtaaaaattgccgaaattttaggggttgatgtaccaacaatggagggcgtagaagaacctatcgagaaagttgcttttattgatgaaaatatgtgtattggctgcacaaaatgtatccaagcctgtcccgttgatgccattattggtacaaataaagcaatgcacacgatcattcccgatctttgtacaggttgcgagctttgtgttgcgccctgcccgacagattgtattttaatgattcccgtgaaaaaaaatattgataattgggattggaaatttgatgcaaaactcgttattccagtaatgaatgtcgatggctctgaaaaaaaattggttgtgggggaataa

SEQ ID NO: 3504 - protein, 193 aa, Haemophilus influenzae
MTFLFIVITLLALIFGAILGFASIKLKVEADPVVEKIDAILPQSQCGQCGYPGCKPYAEAICNGDEITKCIPGGQTTIVKIAEILGVDVPTMEGVEEPIEKVAFIDENMCIGCTKCIQACPVDAIIGTNKAMHTIIPDLCTGCELCVAPCPTDCILMIPVKKNIDNWDWKFDAKLVIPVMNVDGSEKKLVVGE

SEQ ID NO: 3505 - DNA, 2121 bp, Haemophilus influenzae
atggcggacgtattatctcgtttcaattccggtaaattatgggatttcaaaggtggcattcatccaccagaaatgaaatctcaatctaattcacagccattacgccatccgcctctcggctcggatttttacattccactcaaacagcacctaggaacaacaggcaatcttttaataaaagagggcgattacgtcttaaaaggacaagccttaacaaaaggcgatggcttgcgtatgttaccagttcacgcacccacttctggcacaattaaatcgattaaaccttatgttgccacgcatccttcaggtcttgatgaacccacaattcatttacaggcggatggtttagatcaatggatcgaacataatcctattgatgatttttcaacgctatcgccagaacaacttattcacaaaatctatcaagcaggtatagcaggtttaggcggtgcagtattcccaactgctgccaaaattcagtcagcagagcaaaaagtcaaactcttaattatcaatggtgcagaatgtgagccttatatcacttgtgatgatcgtcttatgcgtgaacgcgctgatgaaatcataaaaggcattcgtattttacgttatatattgcaccctgaaaaagttgtcattgccattgaagataacaaaccagaagccatatcggcaatccgcaatgcactacagggagcaaatgatattagcattcgggttattccaacaaaatatccttcaggtgctaccaaacaactgatttatttgctcacagggatagaagtgccaagcggtgagcgttcatccagcattggcgtattaatgcaaaatgtgggaacaatgttcgcaataaaaagagcagttataaatgacgagcctttaattgagcgtgttgtcacccttactggaaataaaatcgctgaaaaaggcaattattgggtgcgtcttggcacacccatttcccaagtattgagcgatgcaggctatcaatttgacaagcattttcctatatttgcaggtgggccaatgatggggctagagcttccaaacctaaatgcgcctgtgacaaaacttgtcaattgtttacttgcgccagattatcttgaatatgccgaacctgaagcagaacaggcttgtattcgttgttctagctgttctgatgcctgcccagtaaatttaatgccacaacaactttattggtttgcacgcagtgaagatcacaaaaaatcggaagaatacgctctcaaagattgtattgaatgtggaatttgcgcctacgtatgcccaagccatattcctctaattcaatatttccgccaagaaaaagctaaaatctggcaaataaaagaaaaacaaaagaaatcagatgaagccaaaattcgctttgaagcaaaacaagcacggatggaacgtgaagaacaagagcgtaaagcgcgttcacaacgtgcagcacaggctcgccgtgaagaattagcacaaactaaaggggaagatccagtcaaggcggcactcgaacgcttgaaagcgaaaaaagccaatgaaacagaatcaacgcagattaaaacactaacctcagaaaaaggagaagttttacctgataacacagatttaatggcacaacgtaaggcacgccgtttagctcgtcagcaagcagcacctcaaatcgaaaatcaagaacaacaaactcaaccaaccgatgcgaaaaaagcagcagttgcagccgcacttgcccgtgcaaaagcaaaaaaacttgcacaagcaaatagctccagcgaagccatttcaaactctcaaaccgcagaaaatgaagtagaaaaaacaaaaagtgcggtagaaaaaacacaagaaaattcaaccgcacttgaccctaaaaaagcagccgtagccgcagcgattgctcgagcaaaagcaaaaattgcgcaaacaaatagcaccagcgaagctatttcaaactctcaaaccgcagaaaatgaagtagaaaaaacaaaaagtgcggtagaaaaaacacaagaaaattcaaccgaacttgaccctaaaaaagcagcagtagccgcagccattgctcgggcaaaagcgaagaaactggcaaaaacacaagcaacattagaaaataatcaggaataa

SEQ ID NO: 3506 - protein, 706 aa, Haemophilus influenzae
MADVLSRFNSGKLWDFKGGIHPPEMKSQSNSQPLRHPPLGSDFYIPLKQHLGTTGNLLIKEGDYVLKGQALTKGDGLRMLPVHAPTSGTIKSIKPYVATHPSGLDEPTIHLQADGLDQWIEHNPIDDFSTLSPEQLIHKIYQAGIAGLGGAVFPTAAKIQSAEQKVKLLIINGAECEPYITCDDRLMRERADEIIKGIRILRYILHPEKVVIAIEDNKPEAISAIRNALQGANDISIRVIPTKYPSGATKQLIYLLTGIEVPSGERSSSIGVLMQNVGTMFAIKRAVINDEPLIERVVTLTGNKIAEKGNYWVRLGTPISQVLSDAGYQFDKHFPIFAGGPMMGLELPNLNAPVTKLVNCLLAPDYLEYAEPEAEQACIRCSSCSDACPVNLMPQQLYWFARSEDHKKSEEYALKDCIECGICAYVCPSHIPLIQYFRQEKAKIWQIKEKQKKSDEAKIRFEAKQARMEREEQERKARSQRAAQARREELAQTKGEDPVKAALERLKAKKANETESTQIKTLTSEKGEVLPDNTDLMAQRKARRLARQQAAPQIENQEQQTQPTDAKKAAVAAALARAKAKKLAQANSSSEAISNSQTAENEVEKTKSAVEKTQENSTALDPKKAAVAAAIARAKAKIAQTNSTSEAISNSQTAENEVEKTKSAVEKTQENSTELDPKKAAVAAAIARAKAKKLAKTQATLENNQE

SEQ ID NO: 3507 - DNA, 1077 bp, Haemophilus influenzae
atgtttaaaatggttagctccccacatacccattcgggaaaactcacagcgcatattatgctttgggtcgttttggcaatgatgcccgcttttttcacgcaaatttattattttggatttggcgtggtgcttcaatccgcattagccattggtacggcaatcattgcggaatttattgcaataaaattacgaggtaaaaaaccgctcaattatctttcagatttcagcgtagccctgactgcgttaattttggcaatggctattccaccttatgcaccttattggattatcatcattggaacactctgtgcagttttattaggtaaacaggtttatgggggtttagggcaaaacccattcaatccagcgatgattggctatgtaattcttctaatttcattcccattacaaatgacaacttggataccaccaattaatttattacaggaaccaccgactttttcagatgcattttcattaatattttcaggtttaaccacggatggatttacgctttcacaacttacgcataacattgatggtatcacccaagcaacgcctttggatagtgcaaaaattttctataaaagtcacactcaattaaatgatttttatgaattaattaaactgcctatctttatgggtaatggaaccgatttcgctcaaggctggtggcaagtcaacgtggctttcttagcgggcggaattttccttattttaaggcgtgtcattcactggcaaattccagtggcgatgcttgtcacctttttctgtttagctaccgcgactgcttttactggtttcacacatttaagtgcgattagccaactcgttagtggtgcaatgatgtttggtgcattttttattgcaacagatcctgtcacagcctccattacaccacgcggaaaaattatttttggcgcattagtggggttatttgtttatctcattcgttatcacggaaattatccagacggcgtggcattcgccattttattaagtaatatttgcgtcccacttatcgatcattacacacgtccgcgcgtatctggttatccaacaaaaggaagaaaataa

SEQ ID NO: 3508 - protein, 358 aa, Haemophilus influenzae
MFKMVSSPHTHSGKLTAHIMLWVVLAMMPAFFTQIYYFGFGVVLQSALAIGTAIIAEFIAIKLRGKKPLNYLSDFSVALTALILAMAIPPYAPYWIIIIGTLCAVLLGKQVYGGLGQNPFNPAMIGYVILLISFPLQMTTWIPPINLLQEPPTFSDAFSLIFSGLTTDGFTLSQLTHNIDGITQATPLDSAKIFYKSHTQLNDFYELIKLPIFMGNGTDFAQGWWQVNVAFLAGGIFLILRRVIHWQIPVAMLVTFFCLATATAFTGFTHLSAISQLVSGAMMFGAFFIATDPVTASITPRGKIIFGALVGLFVYLIRYHGNYPDGVAFAILLSNICVPLIDHYTRPRVSGYPTKGRK

SEQ ID NO: 3509 - DNA, 624 bp, Haemophilus influenzae
atgggtacagtaaaaatcacatcgcgttatggcatattgttaggctttattgccctactttgcacagcaatttctgcagggatttatttcctaaccaaagataaaattgatgcggtaatcgcagcacaacagcgaggattacttctacaagttatcccacaagattatttcaacaataatttgctagaaagtgcggttattcctcaagataaaaattttgtgggtatccaaaaaatttattttgcgaaaaaagatggaaatatttctgcctatgcctatgaaaccaccgcgccagatggttattctggtgatattcgcttgcttgtgggattagatccgaaaggcgaagtgttaggcgtacgagtaatcgaacatcacgaaacaccaggcttaggcgataaaattgaacgccgaatttctaactggattttaggtttcacaaatcaatcgattaatgaacataatttaagcgaatgggcggtaaaaaaagatggcggaaaatttgatcaattttctggtgcaaccattacacctcgcgcagtggttaatcaaactaaacgctcagcattaatcatgctaaataatcaagccttgttacaacagctttcaacacaagtgaaataa

SEQ ID NO: 3510 - protein, 207 aa, Haemophilus influenzae
MGTVKITSRYGILLGFIALLCTAISAGIYFLTKDKIDAVIAAQQRGLLLQVIPQDYFNNNLLESAVIPQDKNFVGIQKIYFAKKDGNISAYAYETTAPDGYSGDIRLLVGLDPKGEVLGVRVIEHHETPGLGDKIERRISNWILGFTNQSINEHNLSEWAVKKDGGKFDQFSGATITPRAVVNQTKRSALIMLNNQALLQQLSTQVK

SEQ ID NO: 3511 - DNA, 708 bp, Haemophilus influenzae
atgacagatttaactgaaaaaaataccgcacttgaagaagaaaaaatagaaagtgcggttgaaaatcaacaaaaatccatctggaaagaaatttttgctcaaggaatttggaaaaataaccctgcggttgttcaacttctcgggctttgtccacttttagcggtgtctagcaccgccaccaacgcgcttggtttgggtttagcaacaatgcttgtactcacttgcacaaatacggtcatttcccttttccgtcaatatattcctaaggaaatccgtattccaatctacgtgatgatcattgcaaccacagtaacagcggttcaacttttaatgaatgcttacacttatacgctttatcaatcactggggatttttattccattaattgtgaccaactgtattattatcggtcgcgcagaagcattcgcctcaaaaaacagcttactccattccatctgggatgggttttcaatgggattaggaatggcacttagtctaaccatactcggcgcattacgtgaaattattggacaaggcacgatttttgagggcatagaaaatctattcggcgaacaagcaaaatttttaacgcaccatatttaccatacagacagtagctttttacttttcattctgccaccaggcgcatttataggcttaggcttgctcctcgccataaaaaatcgaattgataatgtaaaaaaataa

SEQ ID NO: 3512 - protein, 235 aa, Haemophilus influenzae
MTDLTEKNTALEEEKIESAVENQQKSIWKEIFAQGIWKNNPAVVQLLGLCPLLAVSSTATNALGLGLATMLVLTCTNTVISLFRQYIPKEIRIPIYVMIIATTVTAVQLLMNAYTYTLYQSLGIFIPLIVTNCIIIGRAEAFASKNSLLHSIWDGFSMGLGMALSLTILGALREIIGQGTIFEGIENLFGEQAKFLTHHIYHTDSSFLLFILPPGAFIGLGLLLAIKNRIDNVKK

SEQ ID NO: 3513 - DNA, 636 bp, Haemophilus influenzae
atgaacaaaacaaaaagaatcgaaatactcacaagattacgagagcaaaacccccatccgaccacagaattacagtataattcgccctttgaattattaattgcggtcattctatcggcgcaagcaaccgataaaggcgtgaataaagcaacagaaaaactattccccgtggcaaacacgcctcaagcgattttagatttaggattagatggtttaaaaagttatattaaaactatcgggctttttaatagcaaagcagaaaatattatcaaaacttgccgagatttaatcgaaaagcacaacggcgaaatccccgaaaatcgtgaagccttagaagcattagctggtgtgggtagaaaaacagccaatgttgtgctaaatacggcatttggtcatccaactattgcggtagatacccatattttccgtgtatgcaatcgcactaattttgcagcgggtaaagatgtggtaaaagtggaagaaaagctgcttaaagtcgtgcctgatgaatttaaagtggatgttcatcattggttaattttacacggtcgatacacttgtatcgcgcgtaaaccacgttgcggatcttgcattatcgaagatctttgtgaatataaagaaaaagttgaattttaa

SEQ ID NO: 3514 - protein, 211 aa, Haemophilus influenzae
MNKTKRIEILTRLREQNPHPTTELQYNSPFELLIAVILSAQATDKGVNKATEKLFPVANTPQAILDLGLDGLKSYIKTIGLFNSKAENIIKTCRDLIEKHNGEIPENREALEALAGVGRKTANVVLNTAFGHPTIAVDTHIFRVCNRTNFAAGKDVVKVEEKLLKVVPDEFKVDVHHWLILHGRYTCIARKPRCGSCIIEDLCEYKEKVEF

SEQ ID NO: 3515 - DNA, 1374 bp, Haemophilus influenzae
atgataacaaacaataaacagcgacaaacttggtcgagccgcctcacttatgtaatgacagtcgcaggcgcaacggtcggtttcggtgcaacttggcgtttcccttatcttgtgggagaaaatggtggcggtgcttacgttttacttttctgtatcgcaatgattgtaatcggtatcccaatgattttagttgaaaacgtgataggtcgccgcttacgtgtaaattccattgatgcattcggcgataaaattctcgacaaaggaaaaggcatttctaaatattggaaaatattaggttatatgggcttactcggtgcatttggcattatggcgtattatatggtgcttggtggctgggttatttcttatgtcattagcctaatcagcggtacattagacatttcaacccccatcacaaaagacattgccaaaaatttctacgatcttcacatcggcaatagcccttatgaaattatattctacaccctcttatttgttatcgtgaattacattattttagctaaagggatcattggtggaattgaacgttcggtaaaatatttaatgccattactatttatcttcttaattggaatggtaattcgcaacgtaacattaccgggtgcaatggaaggcattacattctatttaaaaccagatttcagcaaaattaccccacaattatttatctttgttttagggcacgtcttcttcgcattaagccttggttttggtgtattaattaccctttccagttacttaaataaagaagaaaacttaatccacaccgccgtaattacaggtttcaccaacacaattattgccgtacttgctggctttatgattttcccctcacttttcacttttgggattgaaccaaacgcagggccaacattagtattccaaagtttacctatcgtattttctcacttatgggcaggtaaattctttgcaattattttcttcggcttattattaattgccgcactaacgacttccatcacaatttatgaagtaatcattaccgcattacaagaaaagctcagaatgcgccgtggcaaagcgattgtcttaaccctcggtgggatttttatcttaggtaatattccagcaattttaggggataatgtatggaaaaacgtcaccattttcggcaaaagcatttttgatttctacgattacgccagtggaaatattctctttatgctgaccgcacttggctgtgctattttcgttggtttcgtgttaaaagatgaagccaaaaaagaactttcttcaacaaaatattcaactttcatcaaaatttggtttaactacgtgaaatttgttgtacccttgatcatcttagttatctttatcagcaacctgttctaa

SEQ ID NO: 3516 - protein, 457 aa, Haemophilus influenzae
MITNNKQRQTWSSRLTYVMTVAGATVGFGATWRFPYLVGENGGGAYVLLFCIAMIVIGIPMILVENVIGRRLRVNSIDAFGDKILDKGKGISKYWKILGYMGLLGAFGIMAYYMVLGGWVISYVISLISGTLDISTPITKDIAKNFYDLHIGNSPYEIIFYTLLFVIVNYIILAKGIIGGIERSVKYLMPLLFIFLIGMVIRNVTLPGAMEGITFYLKPDFSKITPQLFIFVLGHVFFALSLGFGVLITLSSYLNKEENLIHTAVITGFTNTIIAVLAGFMIFPSLFTFGIEPNAGPTLVFQSLPIVFSHLWAGKFFAIIFFGLLLIAALTTSITIYEVIITALQEKLRMRRGKAIVLTLGGIFILGNIPAILGDNVWKNVTIFGKSIFDFYDYASGNILFMLTALGCAIFVGFVLKDEAKKELSSTKYSTFIKIWFNYVKFVVPLIILVIFISNLF

SEQ ID NO: 3517 - DNA, 1056 bp, Haemophilus influenzae
atgttgcagattaatgtgaaaaaacagctcgggcaacttgccttgcaagctaatatacaagtgccagatcaaggtgtgacagctattttcggtttgtctggctcaggcaaaacatcgttgattaatcttgtcagtggcttgatacaaccagacgaaggattcatccgtttaaatgaccgcactttagtggatatggaaagccaagaatcattgccggcccacttgcgtaaaattggctatgtgttccaagatgcgcgcttatttcctcactacacagtgaaaggtaatttgtgctatggcatgaaaaatgtatcgcaagatgattttaactatattgtcgatcttctcggcattactcacttattaaagcgttatccgctcacgctttctggcggagagaaacaacgtgtggcaatagggcgtgcgctgctgactgatcctgatattttactgatggacgaaccactttctgcccttgatgttccccgcaaacgcgagctaatgcaatatttggaacgtctttctaaagaaattaatatcccgattttatatgttacacatagcttggacgaactgttgcgtttagctgatcgggtcgtattgatggaaaacggcattgtgcaagcctatgactgcgtagaaaaaatttggaatagccctatttttgccccttggaaaggggaaaacgaacagagcagtgtacttgccttgcctgttcatttgcataatccaccttataaaatgaccgcactttcgctaggcgaacaagtgctttggattcatcaagtgcccgcgaatgtaggcgagcgagtgcgagtttgtatttatagttcagatgtttctatcactctgcaaaagccagaacaaacaagcattcgtaatattttacgtggcaaaattacacaaattgagatacaagattctcgagtggatcttgccgtattagtggaagggaataagatttgggcaagtatcagtaaatgggcacaaaatgaactacgttttgctgttgggcaagatgtctatgttcaaattaaagcggtgtcggtgatgtag

SEQ ID NO: 3518 - protein, 351 aa, Haemophilus influenzae
MLQINVKKQLGQLALQANIQVPDQGVTAIFGLSGSGKTSLINLVSGLIQPDEGFIRLNDRTLVDMESQESLPAHLRKIGYVFQDARLFPHYTVKGNLCYGMKNVSQDDFNYIVDLLGITHLLKRYPLTLSGGEKQRVAIGRALLTDPDILLMDEPLSALDVPRKRELMQYLERLSKEINIPILYVTHSLDELLRLADRVVLMENGIVQAYDCVEKIWNSPIFAPWKGENEQSSVLALPVHLHNPPYKMTALSLGEQVLWIHQVPANVGERVRVCIYSSDVSITLQKPEQTSIRNILRGKITQIEIQDSRVDLAVLVEGNKIWASISKWAQNELRFAVGQDVYVQIKAVSVM

SEQ ID NO: 3519 - DNA, 690 bp, Haemophilus influenzae
atggaaatctcagcaattaatttaagcctgagtgttgcagtcagttccatgctttggagtttgccgttagccatttttgtggcgtggctcttagcgcgcaaaaacttctatggtaaatccctgattactggcgtaattcatttgcctttagtgttgccacctgtggttatcggttatctattgcttgtcgcgatggggcgcaatggtttcattggtaagtatttatatcagtggtttggcttatcttttggctttagttggaagggggcggtgctttcctctgctgtggttgcctttccattggttgttcgcgcgattcgactttctttagaaaatattgatattaaattggagcaagcggcgcaaacactcggtgcttccgcttggcgtgtattttttacaataaccttgccgctttctttacctggggttttagctggactcgttcttggttttgctcgatcattaggagaatttggcgcgaccattacgtttgtatcgaacattgcaggcgaaactcaaacgattccccttgcgatgtattcttttattcaaacacccgctgcagaagaacaaaccgctcgcttatgtttatttgctatcattctttcattgatttctttgttactgtctgaatggttgagcaagcggatgcagaaaaaattaggacaaggaaatgttgcagattaa

SEQ ID NO: 3520 - protein, 229 aa, Haemophilus influenzae
MEISAINLSLSVAVSSMLWSLPLAIFVAWLLARKNFYGKSLITGVIHLPLVLPPVVIGYLLLVAMGRNGFIGKYLYQWFGLSFGFSWKGAVLSSAVVAFPLVVRAIRLSLENIDIKLEQAAQTLGASAWRVFFTITLPLSLPGVLAGLVLGFARSLGEFGATITFVSNIAGETQTIPLAMYSFIQTPAAEEQTARLCLFAIILSLISLLLSEWLSKRMQKKLGQGNVAD

SEQ ID NO: 3521 - DNA, 765 bp, Haemophilus influenzae
atgaaaaaattaactaaaatttcaaccgcacttttaatcgcaggattaggcttttcttttgcggcatccgctaaagtgactgtatttgcagccgcttcaatgactgatgctttacaacaagtagcaaaagattatgcaaaacaaaatccgaaaaatgaagtagtgttttctttcgcttcttcttcaactttagcaaaacaagttgaagaaggcgcaccagcggatatttttgtatctgcaagcaataaatggatgaaatatctttctgaaaaagatttaaccgtaaaagaaaccgaaaaagttttagtgggcaatgatttagtcttaatcgcaccagcaaaaagtgcggtaaattctgtggatattgctaaaggtgaatggatcaatgcattaaaagatagctatttatctgttggcgatcctgcgcacgtacctgctggtcaatacgcagcagaagcattaaccaaattaaatttatgggataaagtgcaagatcgtttagcgcgtgcaaaagatgtgcgtggtgcattagctttagttgaacgtgcagaagcaccttacggtattgtgtacagcactgatgcaaaagttagccaacaagttaaaacggttgcagtgttccctgcagatagccataaaccagttgtttatcccgtttctattgtaaaaggtcatgataatgcggattctcgcgatttcttgaaatatttagaatcagatgctgcgaagaaagtacttgtagggtatggtttctctgcaaaataa

SEQ ID NO: 3522 - protein, 254 aa, Haemophilus influenzae
MKKLTKISTALLIAGLGFSFAASAKVTVFAAASMTDALQQVAKDYAKQNPKNEVVFSFASSSTLAKQVEEGAPADIFVSASNKWMKYLSEKDLTVKETEKVLVGNDLVLIAPAKSAVNSVDIAKGEWINALKDSYLSVGDPAHVPAGQYAAEALTKLNLWDKVQDRLARAKDVRGALALVERAEAPYGIVYSTDAKVSQQVKTVAVFPADSHKPVVYPVSIVKGHDNADSRDFLKYLESDAAKKVLVGYGFSAK

SEQ ID NO: 3523 - DNA, 768 bp, Haemophilus influenzae
atgaaaaacaccgaaattttactcacaattaaacttcaacaagcactttttatcgatccaaaacgagttcgtttactcaaagaaattcaacaatgcggttcgattaatcaagcagcgaaaaatgcaaaagtgagctataaaagtgcgtgggatcatttagaagccatgaataaaatcagccctcgcccattgctggaacgaaatacaggtggaaaaaatggcggaggtacggtgcttaccacttatgccgagcgtttgctccagctttatgatttattagaacgtacgcaagaacacgcttttcatatcctacaagatgaatccgtgccgttagatagtttactcacggcaaccgcacgtttttctttacaaagtagcgcacgcaatcaattttttgggcgagtggcacaacaacgaatcattgactctcgttgtgttgtggatgtgaatgtgcaaggattaccaacgccgttgcaagtttctattaccacaaaaagctcggctcgtttgaaactcattacggaaaaagaagtgatgctgatgttcaaggctccttgggtaaaaatcagtgaacaaccactggagaatcaatctaatcagttccccgtaaatatcaaatcactcaatgaagaggaagccatccttcaatttgctgaaagcaacattgaattttgtgccacagtccaccagccaaatcaatggcaaatcgggcaacaggtttggattcacattgatcaagagcaaattattttagcgacgctggggtaa

SEQ ID NO: 3524 - protein, 255 aa, Haemophilus influenzae
MKNTEILLTIKLQQALFIDPKRVRLLKEIQQCGSINQAAKNAKVSYKSAWDHLEAMNKISPRPLLERNTGGKNGGGTVLTTYAERLLQLYDLLERTQEHAFHILQDESVPLDSLLTATARFSLQSSARNQFFGRVAQQRIIDSRCVVDVNVQGLPTPLQVSITTKSSARLKLITEKEVMLMFKAPWVKISEQPLENQSNQFPVNIKSLNEEEAILQFAESNIEFCATVHQPNQWQIGQQVWIHIDQEQIILATLG

SEQ ID NO: 3525 - DNA, 804 bp, Haemophilus influenzae
atgaaattttcagtcctaatgtccttatatattaaggaaaatcctcaattcttgcgggagtgttttgaaagtcttggtgcacaaactcgtcaagcagatgaaattgtcttggtttttgatggcgtagtaacgccagaattagaatctgttgtgacagaatttgaaacaaaactgccattaaaattagttaaattgccacaaaatcgaggattaggcaaagccttaaacgagggtttattgcattgtgattatgactgggttttccgtatggatacggatgatatttgcgtgcctgatcgttttgaaaagcaagtagcgtttattgaacagcaccctgaaagcatcatttttggcggacaaattgctgaatttggtaaaaatgtaaatgatattgtggcatatcgtaatgtgccaacgtcggctcaagaaattattaaattcacgcaaaaacgttgtccgtttaatcacatgacggtggcatatcaaaaaagtgcggtcattaattgtggtggatatgaagatcttcaagaagattattatttgtggatcaaacttgtcgcacaaggtttatatatggcgaatttgccagatattttagtttatgcgagagtgggaaatggtatggtgagtcgccgtcgtggcgtcaatcaagctaaagcagaatggcgtttgttcaaattgaaataccgtttgggaattcagggtttgttatctggattatttacttttgcattgcgttttggttctcgtttattgccaacctcgttattgaaaaaactttatcaaacttttttacgtaaatag

SEQ ID NO: 3526 - protein, 267 aa, Haemophilus influenzae
MKFSVLMSLYIKENPQFLRECFESLGAQTRQADEIVLVFDGVVTPELESVVTEFETKLPLKLVKLPQNRGLGKALNEGLLHCDYDWVFRMDTDDICVPDRFEKQVAFIEQHPESIIFGGQIAEFGKNVNDIVAYRNVPTSAQEIIKFTQKRCPFNHMTVAYQKSAVINCGGYEDLQEDYYLWIKLVAQGLYMANLPDILVYARVGNGMVSRRRGVNQAKAEWRLFKLKYRLGIQGLLSGLFTFALRFGSRLLPTSLLKKLYQTFLRK

SEQ ID NO: 3527 - DNA, 885 bp, Haemophilus influenzae
atgttaagcattattgtgccttcttataatcgaaaagcagaagtgccagctttattagaaagtttaactcaacaaacatcgagtaattttgaagtgattattgtggatgattactccaaagagagagtagtcgttgagcaacgctattcttttccagttacagtgattcgtaacgaaaccaatcaaggtgcagcggaaagtcgcaatattggtgcgcgtgcatcaaagggcgattggttgctttttctcgatgatgatgatcgttttatgccagaaaaatgtgaaaaaatactacaagtgattgagcaaaatccagacattaattttatttatcatccagctaaatgtgaaatggtcaatgaagggtttacttatgtgactcaaccgattgaacctcaagaaatctcgacagaacgtattttgttagccaataagattggtggcatgccaatggttgcgattaaaaaagagatgtttttaaaaataggtggattatccaccgcacttcgttctttggaagactatgatttcttgttaaaactgttacaagagtcaagttttaccccttataaaattaatgaaccactaacttattgtactttccatactaaacgctcaagtgtgtctacggataccactaatacgcaaaaagccattgattatattcgcgagcattatgtgaaaacggtagagcaagctcgtaattttgatattaacgcgagctatattttggcttatccccatattatgaatttatcgcgtaaagcggcaaaatattattttgatatttttaagaaaacaaaaagcattaagcaatttattattactttggttattttaatttcgccaaaattagccattaatttaaaacggttgggaaaataa

SEQ ID NO: 3528 - protein, 294 aa, Haemophilus influenzae
MLSIIVPSYNRKAEVPALLESLTQQTSSNFEVIIVDDYSKERVVVEQRYSFPVTVIRNETNQGAAESRNIGARASKGDWLLFLDDDDRFMPEKCEKILQVIEQNPDINFIYHPAKCEMVNEGFTYVTQPIEPQEISTERILLANKIGGMPMVAIKKEMFLKIGGLSTALRSLEDYDFLLKLLQESSFTPYKINEPLTYCTFHTKRSSVSTDTTNTQKAIDYIREHYVKTVEQARNFDINASYILAYPHIMNLSRKAAKYYFDIFKKTKSIKQFIITLVILISPKLAINLKRLGK

SEQ ID NO: 3529 - DNA, 774 bp, Haemophilus influenzae
atgttaaaaaaatatttgatctctttagataaagatattcaacgtcggaaattattcttttctcaaaaaaataccgaggatttccaaattttttctgccattaataccatgcaaaaagattgggatgaattagcctctatttttaatattgaacaatttaaagcacattattttcgtaatgtcactaagggcgagatcggttgtaccttaagccatctttcggtatatcaaaaaattgttgaagacaacgatattgctgaagatagctatgcgttagtctgtgaagatgatgctttattccacttagattttcagcaaaatttaaccgcacttttatcagaaaaacttgaggctgaaattatattgcttggacagtcaaacattaataatttcaatgatactgatttagaaattaattatccgacaactttttcttttctatgcaaaaaaacaggcaatgtaaattacgctttcccttataaaagttattttgctggcacggtgggttatcttataaaaaaatcagcggcaagaagatttatccagcaaatttcccaaaataaaccattttggttagcggatgattttttactctttgaacagaattttaatataagaaataaagtggttcgccctctcatggtaattgaaaatcctgtattgataagcaatttagaaagtgttcgtggatctttatccaataatttacttaaaaaattaatgaaatatccattgaaaaaaatctttgcgattaagaaaaatttggctaattaa

SEQ ID NO: 3530 - protein, 257 aa, Haemophilus influenzae
MLKKYLISLDKDIQRRKLFFSQKNTEDFQIFSAINTMQKDWDELASIFNIEQFKAHYFRNVTKGEIGCTLSHLSVYQKIVEDNDIAEDSYALVCEDDALFHLDFQQNLTALLSEKLEAEIILLGQSNINNFNDTDLEINYPTTFSFLCKKTGNVNYAFPYKSYFAGTVGYLIKKSAARRFIQQISQNKPFWLADDFLLFEQNFNIRNKVVRPLMVIENPVLISNLESVRGSLSNNLLKKLMKYPLKKIFAIKKNLAN

SEQ ID NO: 3531 - DNA, 1062 bp, Haemophilus influenzae
atgaaaaaaattggtttctttataatgaatatcgaaagtgcgggtggaacggagcgcgtttccattaatgttgctaatgctcttgctaaacagggatatgatgtttcttttattagcattggcggtaacaagccttttttccaaatcgatgaaagaattaatatttacgcaatgaataaattgccctattcattgaaaaaagattatttttctatcactaaaaaattaagagaattagttaaagaattacagctggataccttaattgtggttgatggtgcaattatgcttttttctgctttggcgttggttaatttaaatataaaacatattttatgggagcattattcttttaattttacgggcaatcgtctcgttcgcacgctcggtaaatatttagctgtaacaacttgcgataaaatagttacattgacagaagcagaaaaaacgctgtggcaagaaaaatttaaaacaaataatataattagtattgctaatccaaatacgcttttgccaaagaataaattagcaaaattggaaaataaaactattttatctgtagggcatttattttcttataaaggttttgattatttattaaaagcctggcaagttttggcaaaaaaatatccagattggaatttaaaaatagtaggatcgggtgaggaagaagagaatttaaaaaatcttgctaaagcattggatattgaagattcagttaattttattcctcgtactaatgatgtttctttttattatgaaagcagttcaatttattgtttaccttcacaaacagaaggcttgcctttagtcgttattgaagcgatggcatttggcttacctattgttgcctttaattgttctcctggcgtaaagcaattagtggaacataaagaaaatggttttctttgtgaaaaaaataatattgaagaaatggttaaaggtttagatttattaatcaataatcctgaactttatcaacaaatgtcagacaaatctcgtttaatgagtgaagattatggcattgagaaaattattgaagaatggaaagggattttataa

SEQ ID NO: 3532 - protein, 353 aa, Haemophilus influenzae
MKKIGFFIMNIESAGGTERVSINVANALAKQGYDVSFISIGGNKPFFQIDERINIYAMNKLPYSLKKDYFSITKKLRELVKELQLDTLIVVDGAIMLFSALALVNLNIKHILWEHYSFNFTGNRLVRTLGKYLAVTTCDKIVTLTEAEKTLWQEKFKTNNIISIANPNTLLPKNKLAKLENKTILSVGHLFSYKGFDYLLKAWQVLAKKYPDWNLKIVGSGEEEENLKNLAKALDIEDSVNFIPRTNDVSFYYESSSIYCLPSQTEGLPLVVIEAMAFGLPIVAFNCSPGVKQLVEHKENGFLCEKNNIEEMVKGLDLLINNPELYQQMSDKSRLMSEDYGIEKIIEEWKGIL

SEQ ID NO: 3533 - DNA, 915 bp, Haemophilus influenzae
atgaatctcattctttgttgtacaccattgcaagtattaattgcgagaaaaataattgaattacatcctaacgagcaattctttggcgtaatgtttggtggggtatgggataaaaaaagaaccttgtatgcgagtaaattagcggaggtttgtagtgattcgatgaatattgatacgggaaaagatctaaaaggtttcgattctcttaagttaatgcgccagcttaagaataaaattacgcacaaaggttttgataaggtttttctcgccaatcttaattcattatggctacaaacttatcttagtcatgtttcatttaaagagctttatacctttgatgatggttcagataatattttcccacatcctaatttattgagagagcctgacacatttaaatataaactgattaaagcttttattggcgataaatatagtgtgaataaattatttaaaaaaataaaaaaacattatacggtttatcctaattacaaaaatattgtttctaatattgaaccaatttctttatgggataatcaaatagattgcgagatagatggtgaggtctcattttttattgggcaaccattgttaaatacaaaagaggaaaacatctcattaataaaaaaattaaaagatcagattccttttgactattgtttccctcatccagcagaagattatcgagttgatggggtaaattatgttgaatctgaattaatttttgaagattacgtatttaaacatttatcaaataaaaaaataattatttatacgttcttcagttctgttgcatttaatttattaagtcatcctaatgtagaaattcgttttattagaacgagtattccaagatggcaattctgttacgattcatttccagaccttggattaacgatttataaggaaatttaa

SEQ ID NO: 3534 - protein, 304 aa, Haemophilus influenzae
MNLILCCTPLQVLIARKIIELHPNEQFFGVMFGGVWDKKRTLYASKLAEVCSDSMNIDTGKDLKGFDSLKLMRQLKNKITHKGFDKVFLANLNSLWLQTYLSHVSFKELYTFDDGSDNIFPHPNLLREPDTFKYKLIKAFIGDKYSVNKLFKKIKKHYTVYPNYKNIVSNIEPISLWDNQIDCEIDGEVSFFIGQPLLNTKEENISLIKKLKDQIPFDYCFPHPAEDYRVDGVNYVESELIFEDYVFKHLSNKKIIIYTFFSSVAFNLLSHPNVEIRFIRTSIPRWQFCYDSFPDLGLTIYKEI

SEQ ID NO: 3535 - DNA, 1206 bp, Haemophilus influenzae
atgaaagtttttaaagacagtgttatttaccttgttggggaattatcgtcaaagttagttccttttttacttttgccttatttatcccgtaaattgggcgtagaagggtatggctcactttcttattatcaaacttttttaagtttatttttaattgtggtttctttaactcaagaaggcgcaatttcccgttatttttatttttacggaaaacgttcattaaatttagtggtgaataccggctatgcttataccacgataatcggcagtattattttaattggctgttggattgctcagtctgaaatattattttacgcggcactttcctcaatttttcagtctttcttaaatgttcagctaagtgtaagacaatgccagaaaaaggcttggtcttatgcttttattcaattttcacttactgttacgggagctgtatttaccgtcgcattgcttgagtattatcaaaatgatcttgttgaaaaaagaattttggcaattttattgagtaatttagtcgtctggtttttttcttattttctttacagaaagagtacgacatctaaaaaatatcaatttaaacattatcaatccgcattattttatattttaggatttggattaccgcttattttacattatgcaagttttttcttaaaagggcagttagaccgtatttttatttatcacaaattcagtgaaacagatttagggctttatgctatgggggctcaacttgctttaattgtttctattgctattcaagcacttaataaagcgattatcccctatttttatgaagccttaaaacaaaaaaaattagttattcaacagttacataaatgggcgttattttcctttttgctaatacctattcctgccttaataatgtggattattcctgaggatgtgttagtttggattttaggtagtcaatttgtgggaacgaaatattattttattttatttttaatttcgaccacattaagtattccttatttgattttagttaattatcttttctattatgggaaaaataaacttatttcccaatgttcggttttatctacagttatttatgtggcaagccttgtggctttaacttttacagaaattaaatatatcccttatgctggaattattggttcgctttccattattcctattctttattttatgacatctaaagtgagtaaaaccctatga

SEQ ID NO: 3536 - protein, 401 aa, Haemophilus influenzae
MKVFKDSVIYLVGELSSKLVPFLLLPYLSRKLGVEGYGSLSYYQTFLSLFLIVVSLTQEGAISRYFYFYGKRSLNLVVNTGYAYTTIIGSIILIGCWIAQSEILFYAALSSIFQSFLNVQLSVRQCQKKAWSYAFIQFSLTVTGAVFTVALLEYYQNDLVEKRILAILLSNLVVWFFSYFLYRKSTTSKKYQFKHYQSALFYILGFGLPLILHYASFFLKGQLDRIFIYHKFSETDLGLYAMGAQLALIVSIAIQALNKAIIPYFYEALKQKKLVIQQLHKWALFSFLLIPIPALIMWIIPEDVLVWILGSQFVGTKYYFILFLISTTLSIPYLILVNYLFYYGKNKLISQCSVLSTVIYVASLVALTFTEIKYIPYAGIIGSLSIIPILYFMTSKVSKTL

SEQ ID NO: 3537 - DNA, 744 bp, Haemophilus influenzae
atgttagaactcggaaaacttcttaccgcacttatcgcaccacctcttaatacctttgtattactgattattgcagcgattatttattgtgttcatttcaaaaaattagccaaatttcttgcgattataagtttcacttggctttatatcatgagtgcaccttttactggtttattgctaacagataatgatgacattccagcccttaccctagatgagtataaacaagctcaagccatcgtgatattaggcggtggatcttacccaaccaaagagctgtatgcagaaacggcttctggtgcaccacaactagaacgtttacgttatgcggcatttttacaaaaggaaacgggcttgcctattttaaccacgggctattctttgataggcatttctgaaggcgatttaatggcaaaagaacttaaccaattctttaatgtgccaacacaatggatcgaaaataaagcccgtaatacggaagaaaatgccagtttcactaaaaatattttaattaaagatcatattcaaaaaattattttagtaacaaatcaatggcatatgaaacgagccaaatatctttttgaaaaacaaggatttgatgtacttcctgctgctgcagcaagctatggcagcaaaggaaatctatctgcaaaatcttttattcctgacttaggtgcattgaatagcaatatggttttattaaaagagtggattggttattggaaagcccattatgtagaataa

SEQ ID NO: 3538 - protein, 247 aa, Haemophilus influenzae
MLELGKLLTALIAPPLNTFVLLIIAAIIYCVHFKKLAKFLAIISFTWLYIMSAPFTGLLLTDNDDIPALTLDEYKQAQAIVILGGGSYPTKELYAETASGAPQLERLRYAAFLQKETGLPILTTGYSLIGISEGDLMAKELNQFFNVPTQWIENKARNTEENASFTKNILIKDHIQKIILVTNQWHMKRAKYLFEKQGFDVLPAAAASYGSKGNLSAKSFIPDLGALNSNMVLLKEWIGYWKAHYVE

SEQ ID NO: 3539 - DNA, 2271 bp, Haemophilus influenzae
atgacaacatcacatattttaggctttcctcgtgtaggggcaaaacgtgaattaaaattcgcacaagaacgttattggcgtaaagaattagcagagcaagatttattagatttagcgaaagcgttgcgtgaaaaaaactggaaacatcaagcagcggcgaatgcggatttcgttgcagtgggcgatttcacgttctacgatcatattttagatttacaagtggcaacaggggcaattcctgttcgttttggttttgatagccaaaatttaacccttgatcaatatttccaacttgcacgtggtaacaaagatcaattcgcaattgaaatgaccaaatggtttgatacgaactatcactatcttgtgcctgagttccaaaaatcgaccgctttcaaagctaatccagcacattatgtaaaccaaatccgtgaagcaaaagccttaggcttaaacttcaaacctgtgattgttggcccattaacattcttatggttaggtaaagaaaaaggcgaagcatttaaccgtttcgatttactaaatcaattagtgcctgtttatgttgaaatattaaatgcattagtggctgaaggagcagagtggattcaaattgatgaacctgcattagcattagatttaccagcagaatgggttgaagcctataaatctgtttacactgaattaagcaaagtgaacgcaaaattattattagccacttattttggttcagttgcagaacacgctgaattattaaaagccttacctgttgcaggcttgcatttagatttagttcgtgcaccagaacaacttgcggcatttgaagattacagcaaagtgttatcagctggtgtgattgaaggtcgtaatatctggcgtgcaaacttaaacaaagtgttagatgtattagagccattaaaagcaaaattaggtgagcgtttatggattgcaccaagctgttcattattgcacaccccatttgatttagaagtggaagtacaattaaaagaaaaaaataccgcactttatagctggttatctttcacgctacaaaaagtagaagaattaaacgtattaaaacaagcgttaaataatggcagagcatctgtacaagcagcattagatgcaagccaagcggcagcagatgcacgcgcaatgtcaaaagaaattcatcgccctgaagtggcagaacgtttagcaaacttgccaaaaggtgcggatcaacgtaaatcgccatttgcagaacgtattgttaagcaaaatgcgtggttaaatttaccgcttctgccaactacaaacattggttcattcccacaaactactgaaattcgtcacgcacgtgcgagtttcaaaaaaggcgagttatctcttgcagattacgaagcggcaatgaaaaaagagatcgaatatgtagtacgtcgccaagaagaattagatttagatgtgttagttcacggtgaagcagaacgtaacgacatggtggaatactttggggaattattagatggtttcgcattcactaaatttggttgggtacaaagctacggttcacgctgtgtaaaaccaccagtaatttacggtgatgttacccgccctgagccaatgacagtacgctggtcacaatatgcgcaaagtttaactaaccgtgtaatgaaaggaatgctcacaggccctgtgactattttacaatggtcattcgtgcgtaacgatattccacgttcaaccgtatgtaaacaaatcggcgtagcattatctgatgaagtgttagatttagaagcagcaggcattaaagtcattcaaattgacgaaccagccattcgtgaaggtttaccgcttaaacgtgcagattgggacgcatacttacaatgggcaggcgaagcattccgtttaagctcaatgggcgtgcaagatgatacgcaaattcacactcatatgtgttattccgagtttaacgatatcttacctgccattgcggcattagatgcggatgtgattaccatcgaaacttcacgttcagatatggaattattaacggcatttgcagatttcaaatatccaaatgatattggcccaggtgtttatgatattcacagccctcgtgtgccaacggcaacggaagtagaacatttattacgcaaagcattaaatgtaattccaaaagaacgcttatgggtaaacccagactgcggtttaaaaacacgtggttgggcagaaactatcgatcaattaaaagtgatggtggatgtaacgaaaaaattacgtgcggaattagcgtaa

SEQ ID NO: 3540 - protein, 756 aa, Haemophilus influenzae
MTTSHILGFPRVGAKRELKFAQERYWRKELAEQDLLDLAKALREKNWKHQAAANADFVAVGDFTFYDHILDLQVATGAIPVRFGFDSQNLTLDQYFQLARGNKDQFAIEMTKWFDTNYHYLVPEFQKSTAFKANPAHYVNQIREAKALGLNFKPVIVGPLTFLWLGKEKGEAFNRFDLLNQLVPVYVEILNALVAEGAEWIQIDEPALALDLPAEWVEAYKSVYTELSKVNAKLLLATYFGSVAEHAELLKALPVAGLHLDLVRAPEQLAAFEDYSKVLSAGVIEGRNIWRANLNKVLDVLEPLKAKLGERLWIAPSCSLLHTPFDLEVEVQLKEKNTALYSWLSFTLQKVEELNVLKQALNNGRASVQAALDASQAAADARAMSKEIHRPEVAERLANLPKGADQRKSPFAERIVKQNAWLNLPLLPTTNIGSFPQTTEIRHARASFKKGELSLADYEAAMKKEIEYVVRRQEELDLDVLVHGEAERNDMVEYFGELLDGFAFTKFGWVQSYGSRCVKPPVIYGDVTRPEPMTVRWSQYAQSLTNRVMKGMLTGPVTILQWSFVRNDIPRSTVCKQIGVALSDEVLDLEAAGIKVIQIDEPAIREGLPLKRADWDAYLQWAGEAFRLSSMGVQDDTQIHTHMCYSEFNDILPAIAALDADVITIETSRSDMELLTAFADFKYPNDIGPGVYDIHSPRVPTATEVEHLLRKALNVIPKERLWVNPDCGLKTRGWAETIDQLKVMVDVTKKLRAELA

SEQ ID NO: 3541 - DNA, 1077 bp, Haemophilus influenzae
atgataaatacccttgatcgttatattggaaaaagtattcttggcgcgatttttgctactttaatgactttagtgggattgtcggcgattattaaatttgtcgaacaatttcgtagtgtaggtaaaggcacttatgatatttggcaagcggtaatttttactggtttaactataccgaaagatattgaaactttctttcctatggcagcattgcttggggcattaattgcactaggtaatcttgctagcagaagcgaacttgttattatgcaatcagctggattttctcgctttaaaataggtatagcggtaatgaaaactgcattaccattagtagtatttacaatgattattggggagtggggaattccacaaacagaacaatttgcacgagatatgcgcgctaaggctctttctggtggttcaatactttcaattaaaaatggtgtgtgggcgaaagatggtcatcattttgtatttgttaggcgtgtgacggatgatacaaaattagacgatatttatatttatacctttgatcaacagcataatttaataaaattaaaacatgcaaaccaggcgagttattctgaagatgaagctaaatggacattgcgtcaagttaatcattcaacgattacgaaagaggaaatcatcacaacgaatcatttatcagaaacttgggaaactagtttgacgccagataaattaggtgcggtttctttgcgcccgacatcattatctatctcaggtttatatcattacatttcatttctgcgtgaaacagggcaagatgtgagtcgttttgaactcacgttttggcgtaaaattttccagcctgtatccgttggcgtaatgatgttattagccttatcttttatttttggctcgctacgcagtgtgactgcaggtgcaaggatagttactgggatttgtgtaggattcttattttatgttgttaatgaaattttaggacaaacgagtgtagtttacggtattcctgctatttttggtgcattgatcccgagcttgcttttcattgtaatgatttggtggttattaagtcgtaagcgagattaa

SEQ ID NO: 3542 - protein, 358 aa, Haemophilus influenzae
MINTLDRYIGKSILGAIFATLMTLVGLSAIIKFVEQFRSVGKGTYDIWQAVIFTGLTIPKDIETFFPMAALLGALIALGNLASRSELVIMQSAGFSRFKIGIAVMKTALPLVVFTMIIGEWGIPQTEQFARDMRAKALSGGSILSIKNGVWAKDGHHFVFVRRVTDDTKLDDIYIYTFDQQHNLIKLKHANQASYSEDEAKWTLRQVNHSTITKEEIITTNHLSETWETSLTPDKLGAVSLRPTSLSISGLYHYISFLRETGQDVSRFELTFWRKIFQPVSVGVMMLLALSFIFGSLRSVTAGARIVTGICVGFLFYVVNEILGQTSVVYGIPAIFGALIPSLLFIVMIWWLLSRKRD

SEQ ID NO: 3543 - DNA, 930 bp, Haemophilus influenzae
atggcgcagttgatgttgccactatgtttatttattgcgattttactgacttttggtcgcctttacgctgaaagtgaaatcacagtgatgcgcgcgtgcggtgtggggcaacggattttggttaaagtggcactgattatgtctttattaacggcaggtattgccgcttataacgcattatggctttcgccttgggcaattcaaaaacaagtgaatatggtggaagatgcaaaggctaatccaaccgttggcgtgctgtcttcaggtcagtttatttctaccaataacaataacgttgtgttatttattgataagattaaagataatcaaatccgcaatgtttatttatttcaaatgacacctcaaaaacaaacaaaaccttcagtgataacagctgaaaaaggggaattaattgcgttgccaaatggtgatcaagtcttaaatttgaaaaatacaaaacgggttgaaggaacctccgctttgccagattttcgcattacgcattttgatgaatatcacgcctatttaggttatcaatccgcagaaaataccaatgatgaagtagcagaattaacattgtctcaacttatcgatttagattcttcttctgcgaaagctgaattgcattggcgtattaccttaattttggcagtgccattaatggcattgattgctgtaccattaagtcgcgtaaatcctcgacaaggtagatttgccaaaattttacccgcacttttactctatttaatttatttcttgttacaaagctcttttaaatctgcaggttcagcgggaaaattagaggctgaacttttaatgccgcttgttaatatcggatttttcttacttgctgtggtgttgaatagctgggacagtgaaataatgtataaatttcgctatttattcagtaagaaaggatcggcaaaatga

SEQ ID NO: 3544 - protein, 309 aa, Haemophilus influenzae
MAQLMLPLCLFIAILLTFGRLYAESEITVMRACGVGQRILVKVALIMSLLTAGIAAYNALWLSPWAIQKQVNMVEDAKANPTVGVLSSGQFISTNNNNVVLFIDKIKDNQIRNVYLFQMTPQKQTKPSVITAEKGELIALPNGDQVLNLKNTKRVEGTSALPDFRITHFDEYHAYLGYQSAENTNDEVAELTLSQLIDLDSSSAKAELHWRITLILAVPLMALIAVPLSRVNPRQGRFAKILPALLLYLIYFLLQSSFKSAGSAGKLEAELLMPLVNIGFFLLAVVLNSWDSEIMYKFRYLFSKKGSAK

SEQ ID NO: 3545 - DNA, 1476 bp, Haemophilus influenzae
atgaaatatcaagcaaaaaataccgcactttctcaagccactgattgcattgttttaggcgtctatgaaaataataaattttcaaaaagttttaatgaaatcgatcaattaacccaaggttatttaaacgatttagtcaaatcaggtgagctcactggcaaattagcccaaaccattttacttcgtgatcttcaaggtttatctgctaaacgcctattaatcgttggctgtggcaaaaaaggagaactcacagagcgtcaatataaacaaatcatccaagctgtattaaagacactaaaagaaaccaacacgcgtgaagtcatttcttatttaactgaaattgaattaaaagatcgcgatctttattggaatatccgctttgccattgaaacgattgaacacaccaattatcaatttgatcatttcaaatctcaaaaagcagaaacctctgttttagaatctttcatctttaatacggattgtaatcaagcacaacaagctatttctcacgccaatgccattagctcaggcataaaagcagcacgcgacatcgcaaatatgccaccaaatatttgtaatccagcttatcttgctgagcaagcaaaaaatttagcagaaaattctaccgcactttcattgaaagttgtggatgaagaagaaatggcaaaacttggaatgaacgcttatcttgccgtctcaaaaggctctgaaaaccgtgcttatatgtctgttttaacattcaataatgcgccagataaaaacgccaaacccattgtacttgtaggtaaaggattaacctttgatgctggcggtatttcacttaaacccgccacagatatggatgaaatgaaatatgatatgtgcggtgcagcctctgtcttcggcacaatgaaagccattgcacagttgaacttgccattaaacgttattggtgttttagcaggttgtgaaaatctgccagatggcaatgcttatcgcccaggcgatattcttaccactatgaatggtttaaccgtagaagttcttaatactgatgcagaaggtcgattagtgctttgtgatgcccttacttatgttgagcgttttgaacctgagcttgttattgatgttgcaaccttgactggtgcttgtgtggttgcactagggcaacacaatagcggcttagtttctacagataacaatcttgccaatgcactactccaagccgcaacagaaaccactgacaaagcgtggcgtttaccattaagcgaagaatatcaagagcaacttaaatcgcctttcgccgaccttgccaacattggcggtcgctgggggggcgcaattacagcgggtgcatttttgtctaacttcacgaaaaaatatcgctgggcacatttagacattgcaggtacagcttggttacaaggcgcaaataaaggtgcaactggccgccctgtttctttattaacccaatttttgattaatcaagttaaataa

SEQ ID NO: 3546 - protein, 491 aa, Haemophilus influenzae
MKYQAKNTALSQATDCIVLGVYENNKFSKSFNEIDQLTQGYLNDLVKSGELTGKLAQTILLRDLQGLSAKRLLIVGCGKKGELTERQYKQIIQAVLKTLKETNTREVISYLTEIELKDRDLYWNIRFAIETIEHTNYQFDHFKSQKAETSVLESFIFNTDCNQAQQAISHANAISSGIKAARDIANMPPNICNPAYLAEQAKNLAENSTALSLKVVDEEEMAKLGMNAYLAVSKGSENRAYMSVLTFNNAPDKNAKPIVLVGKGLTFDAGGISLKPATDMDEMKYDMCGAASVFGTMKAIAQLNLPLNVIGVLAGCENLPDGNAYRPGDILTTMNGLTVEVLNTDAEGRLVLCDALTYVERFEPELVIDVATLTGACVVALGQHNSGLVSTDNNLANALLQAATETTDKAWRLPLSEEYQEQLKSPFADLANIGGRWGGAITAGAFLSNFTKKYRWAHLDIAGTAWLQGANKGATGRPVSLLTQFLINQVK

SEQ ID NO: 3547 - DNA, 2010 bp, Haemophilus influenzae
atgacaaagcgaacgtcatttaatcctttggtaattggcgttacgttattttttatattgttactgatggcaatgatttttattgcgccagagcaaactcaagcattattgaatcaagctaaaagtggtatttttgctaattttagttggttttatgtactcactttttcagtgtttttaggatttttattaattttatcagtaagtagtcttggcaatataaaattagggcaggatgaagaagaacctgaatttagtttcttatcttggcttgcgatgttatttgccgctggaatgggggttgggctgatgttttttggcgtagcagaaccattaacccattatctttctgacattacagcaggttctgcagaacataaacaacaagaggctttacttcatactctgttccactggggaattcacgcgtgggcagtatatggcgccattgctttagcattagcttattttgggtttcgttataaattacctttagcgttgcgctcttgtttttatcctttattaaaagatcgtattaatggcaaaattggcgatgcgattgatgttatggcattacttgccacattatttgggattattactacattaggttttggttcatcacagcttggtgcagggcttgaacaaataggttggataagtcagaacagctttgccttacaagttggcgttattgttgtggtgatgtgtttagcggtgttttctgctatttctggtattggaaaaggcgtgaaaatattaagtgaaattaacttaactttagcattttgtttacttcttttcgttttaattgcagggcctacgttataccttttatctgcatttagcgacaatattggtaattatttcagcaacttagtgcaactcagttttaaaacctatgcttatgaacaagaacatactagctggtttagcggatggactgtgctttattgggcttggtggtgttcttgggctccgtttgtgggtttatttattgcgcgtatttctaaagggcgaactatccgtgaatttatttttggcgtattagttattccaagtttatttggtattttatggtttactgtttttggtaatacagcagtatggctaaatgatggcattgctgcgggcgggcttggcgaatttatttcttccccagaaattttattatttaaatttttaaattatctacctttaccaacaataacaggctttgtgagcttattagtgatttcattgttttttatcacttcagcggattcaggtatttatgtgttaaataacattgcatctcgagataaaagtttagcttcgcctgcgtggcaagccataatgtggggaactttaatgtccgttgttgcgattgtgcttatgcaatctggtggacttgctaatttgcaaacaatgacattaattgttgccttgccttttgctttattgatgttggtaatgtgttttagtttatggaaaggcttaattgcggataaaaaatatttttctactaaagtcaatccaactagtattttctggagcggcgataaatggaaatcacatttggagcaaatgatgaaccaaacgcaagagaaagatattttacgtttccttaaaaatacggcgttacccgctatgcgagaattacgtcaagaattaacaggaaaatataatttaagtgtagaaatcaacacattatttgaacaagaagagccagctttggaattggtaattcataaagaatcaatgcgagattttatgtatggtattaaatctgttgggcgagaagtgtcagagcaattaattaacgatgaaaatttaccgcacattcagcatagtgttacttacgagccttacacttatttttttgatggacgagtcggttatgatgttcaatatatggatcaagatgaattgattgccgatatgttgaaacaatatgaacgttatctaagtttgcttgatgatgtggggcaagagttaatggcacacgagcaaaccgaactagcagagtaa

SEQ ID NO: 3548 - protein, 669 aa, Haemophilus influenzae
MTKRTSFNPLVIGVTLFFILLLMAMIFIAPEQTQALLNQAKSGIFANFSWFYVLTFSVFLGFLLILSVSSLGNIKLGQDEEEPEFSFLSWLAMLFAAGMGVGLMFFGVAEPLTHYLSDITAGSAEHKQQEALLHTLFHWGIHAWAVYGAIALALAYFGFRYKLPLALRSCFYPLLKDRINGKIGDAIDVMALLATLFGIITTLGFGSSQLGAGLEQIGWISQNSFALQVGVIVVVMCLAVFSAISGIGKGVKILSEINLTLAFCLLLFVLIAGPTLYLLSAFSDNIGNYFSNLVQLSFKTYAYEQEHTSWFSGWTVLYWAWWCSWAPFVGLFIARISKGRTIREFIFGVLVIPSLFGILWFTVFGNTAVWLNDGIAAGGLGEFISSPEILLFKFLNYLPLPTITGFVSLLVISLFFITSADSGIYVLNNIASRDKSLASPAWQAIMWGTLMSVVAIVLMQSGGLANLQTMTLIVALPFALLMLVMCFSLWKGLIADKKYFSTKVNPTSIFWSGDKWKSHLEQMMNQTQEKDILRFLKNTALPAMRELRQELTGKYNLSVEINTLFEQEEPALELVIHKESMRDFMYGIKSVGREVSEQLINDENLPHIQHSVTYEPYTYFFDGRVGYDVQYMDQDELIADMLKQYERYLSLLDDVGQELMAHEQTELAE

SEQ ID NO: 3549 - DNA, 1356 bp, Haemophilus influenzae
atgaaaaatagaagccttacgttgcgtcttatttctgtgctttgtttaaccgcactttttgtttggctgggttctacgcttgtggcttggtggcaagtgcgccacgatgtgaataaagtttttgatgcacaacaagttctctttgctgaacggctcgcaaattcagatttaagtactattttgttggaatctagcacaacgctaaataaaaattcacagtcggtattaaaaaaaagttatgacgatgatgccttagcctttgctattttttctaaaactgggaaacttttattcagtgatgggcgaaatggaaaagattttatttttaattataaaacggggttttataatgcgaatatttatgatgatgacgataaatggcgaattttttggcgtatggcagctaatggagaattagttatcgcagtagggcaagaattagattatcgtgaagatttaattgaagaaatgatctttgggcaaatgtggatttggtttgccagtttgcctattttgatcattgttttaggatggttgattcataaagaacttcgaccgattaaacgtttaagccaagaagtacaaacgagaaaatctggcgatgtgtcattgctgaatacggaggggctacccgttgagattttacccttagtaaaaaatttaaatcaattttttgaccgcacttcagctatgttgcaacgcgaacgccgttttacttctgatgcagctcacgaattgcgtagtccattggcggcattgcgtattcaaactgaagttgcgcaactagctggcgatgatgtagcgttacgagaacaagcacttttacatttaacccaagggattgatcgtgcatcgcagttaattgagcaacttttaacgctttcaaaactagataatttacaagaattggaagaattacagcctattgattgggaaggcatcattcaatcgctgattgctgagcgttattttgtggcagaaaaacgtaaaattaccttggtttttgagaaagaaactgaaccaaagcaaaaacaagggcaatcaattttagtttcattgatgcttagaaatttactcgacaatgctattaaatattgtcctgaagatacaatcgtttcagtaaaaatttcatcctcacagattattattgaggacaatggtggtggcgttgaacctgaagatttgaaaaaacttggacagcgtttttatcgtccagctgggcaaaatgaaaagggaagtggcttggggctttctattgttatgcgaattgcggaattacacggatttaaagtgcggttagaaaacgttgtaaaagaggggagaagaattggcttaaaagcaataatatccttgtag

SEQ ID NO: 3550 - protein, 451 aa, Haemophilus influenzae
MKNRSLTLRLISVLCLTALFVWLGSTLVAWWQVRHDVNKVFDAQQVLFAERLANSDLSTILLESSTTLNKNSQSVLKKSYDDDALAFAIFSKTGKLLFSDGRNGKDFIFNYKTGFYNANIYDDDDKWRIFWRMAANGELVIAVGQELDYREDLIEEMIFGQMWIWFASLPILIIVLGWLIHKELRPIKRLSQEVQTRKSGDVSLLNTEGLPVEILPLVKNLNQFFDRTSAMLQRERRFTSDAAHELRSPLAALRIQTEVAQLAGDDVALREQALLHLTQGIDRASQLIEQLLTLSKLDNLQELEELQPIDWEGIIQSLIAERYFVAEKRKITLVFEKETEPKQKQGQSILVSLMLRNLLDNAIKYCPEDTIVSVKISSSQIIIEDNGGGVEPEDLKKLGQRFYRPAGQNEKGSGLGLSIVMRIAELHGFKVRLENVVKEGRRIGLKAIISL

SEQ ID NO: 3551 - DNA, 717 bp, Haemophilus influenzae
atggcgggcattagctcgctatttttgtttataaagtgtggtcaattttttatgagaattttattaatagaagacgataatctaatcggcaatgggttgcagattggtttaactaaacttggttttgcggtggattggtttaccgatggaaaaacaggaatggctgctttaacctctgcgccttatgatgcggtggtattggatttaaccttgcctaaacttgacggattagaggtattgcaacaatggcgatctaatcatcaagatgttcccgtattaattttgactgctcgcgatactttagatgaacgagttaaaggtttacaaagtggtgcagatgattatctttgcaagccttttgctttggctgaagtcgccgcacgtttacaagcacttattcgtcgtcgttatggatatcatcattctgtgatagaacaggctggtgttaagctcgatcagaatcaacgttctgtttggctgaataatcaacccatttctttaacaagccgtgaatataaattgcttgaattatttatgctgaataaagatcgcgtattgtctcgctcatccattgaagaaaaattatccagttgggatgaagaaattagcagtggcgcattggatgtgcatatttataatttacgccaaaaattggggaaacaatttattcgcacggtacacggtgttgggtatgctttaggacaaattgaaaaatga

SEQ ID NO: 3552 - protein, 238 aa, Haemophilus influenzae
MAGISSLFLFIKCGQFFMRILLIEDDNLIGNGLQIGLTKLGFAVDWFTDGKTGMAALTSAPYDAVVLDLTLPKLDGLEVLQQWRSNHQDVPVLILTARDTLDERVKGLQSGADDYLCKPFALAEVAARLQALIRRRYGYHHSVIEQAGVKLDQNQRSVWLNNQPISLTSREYKLLELFMLNKDRVLSRSSIEEKLSSWDEEISSGALDVHIYNLRQKLGKQFIRTVHGVGYALGQIEK

SEQ ID NO: 3553 - DNA, 366 bp, Haemophilus influenzae
atgaaaaaatttgcattagcaacaatcttcgcattagcaaccacttcagcatttgctggttttaatggcaataatagtcaaggtggttttcaacaagcagcccctgctgcaattagtgtaaaacaagctttatctgcggctgataattcaatgattactttagtagggaatatcactcagcaaattgatgacgatgagttttggtttactgatgggactgggcaaatcaagattgaaattaaaaaacgcgtttggaatggtttaaacgtagattctaaggataaagtgaaaatttatggaaaattggataatgaggtatttgagaaagcggagcttgatgtattacgtatcgaaaaagtagaataa

SEQ ID NO: 3554 - protein, 121 aa, Haemophilus influenzae
MKKFALATIFALATTSAFAGFNGNNSQGGFQQAAPAAISVKQALSAADNSMITLVGNITQQIDDDEFWFTDGTGQIKIEIKKRVWNGLNVDSKDKVKIYGKLDNEVFEKAELDVLRIEKVE

SEQ ID NO: 3555 - DNA, 135 bp, Haemophilus influenzae
gtgatgaatggtcagttaaatttacgctcagaaacgaccgcactttctttgaaacaaggtgaggctgcttttaatgcgtcttatgaagtggaaggattaattgaaggctatgcagtggtcgcaaaattgccttga

SEQ ID NO: 3556 - protein, 44 aa, Haemophilus influenzae
MMNGQLNLRSETTALSLKQGEAAFNASYEVEGLIEGYAVVAKLP

SEQ ID NO: 3557 - DNA, 627 bp, Haemophilus influenzae
atgatgattgctttatctgatttctggttgttgcatggttttaaaaataaatcggatattatcgaaactttagcatcgcgatcatctttagtcccgcttgcaaaaaaattgcaggaacaagatttacgtgctttttatgctgatattatgcaggcagaacaagcacagttacaccaatggctttccccaattctgttagaaaaacaagcaacttatcaggctaataatctggatttaactaatccagactattgggtgatttacactattgatgcgatgaatatttctttagataaattagatgctggtttaatttgtttctatttgtttaatattgtgcacctcaaaaaaggcgagggaatttaccaagatgctggtattccacacgcttatttacgtgggcaaaatattgaattgatggcttgttcggataatgtgattcgaggtggtttaacgcctaaatatgtcgatattcctgaattgcttaaaattgtcgattgtcgtgaagtggagcctaaattattccaacagcctctcaagacgcacgcatatttacttacgccacgccagcaaaagatttcgctttgcaaaatattcaatatgaatgtggcgaaacacatcatttaa

SEQ ID NO: 3558 - protein, 208 aa, Haemophilus influenzae
MMIALSDFWLLHGFKNKSDIIETLASRSSLVPLAKKLQEQDLRAFYADIMQAEQAQLHQWLSPILLEKQATYQANNLDLTNPDYWVIYTIDAMNISLDKLDAGLICFYLFNIVHLKKGEGIYQDAGIPHAYLRGQNIELMACSDNVIRGGLTPKYVDIPELLKIVDCREVEPKLFQQPLKTHAYLLTPRQQKISLCKIFNMNVAKHII

SEQ ID NO: 3559 - DNA, 501 bp, Haemophilus influenzae
atgggcttatttgacaagttatttggttcaaaagaaaacaaatctgtggaagttgaaatttatgcaccgatctctggcgagatcgttaatattgaagatgttcccgatgtggttttctctgaaaaaattgttggtgatggtgttgctgttcgtcctattggtaacaaaatcgttgcgccagtggatggtgtgattggtaaaatttttgaaaccaatcacgctttttcaatggaatcaaaagaaggcgtagaattatttgtacactttggtattgatactgttgagttaaagggggaaggctttactcgtattgcgcaagaagggcaatctgttaagcgtggcgatactgtgattgaatttgatcttgcgctattagaatcaaaagcaaaatctgtcttaacaccaatcgtaatttcaaatatggacgaaatttcttgtatcgtaaaaaaatcaggcgaagtagtggctggagaatcagtggtattagccttaaagaaataa

SEQ ID NO: 3560 - protein, 166 aa, Haemophilus influenzae
MGLFDKLFGSKENKSVEVEIYAPISGEIVNIEDVPDVVFSEKIVGDGVAVRPIGNKIVAPVDGVIGKIFETNHAFSMESKEGVELFVHFGIDTVELKGEGFTRIAQEGQSVKRGDTVIEFDLALLESKAKSVLTPIVISNMDEISCIVKKSGEVVAGESVVLALKK

SEQ ID NO: 3561 - DNA, 1728 bp, Haemophilus influenzae
atgatttctggcattctcgcatccccaggtattgcctttggtaaggcacttgttcttaaagaagaaaagattgttcttgatacacaaaaaattactgatgatcaaattgacgcagaagtcgctcggttttacgaaggacgtaacgcggcggtagaacaacttaattcaattagagaacgtgcattaatttctttaggcgaagaaaaagcggcaatctttgaaggtcacttgatgattcttgaggatgaagaattagaagaagaaattcttgattatcttcgttcaaataaagtgaatgcaggcgttgcggcgagtaaaattttagatcaacaagtgacaatgttatctgaaattgatgatgaatatttgaaagaacgtgcaggcgatattcgggatattgctaaccgtttagttaaaaatattttgggaatgtacattgttgatcttggagatattcaggaagaatctattcttgttgcttatgatctgactccctcagaaacagctcaacttaatcttgaaaaagtattaggggttattactgatattggtggtagaacttcccatacttctattatggcgcgttctttagaattgccagcgattgtcggcacaaataaagtgactaaattagtcaatacgggcgattatttaattttagatgctatcaataaccaagtttatattaatccaacagcatctcagattgatgaattaaaagcacttgaagcgaaaatttctgaggaaaaagcagagttagctaaattaaaagatcttcctgcaatcacattagatggacataaggttgatgtggttgcgaatatcgggacgattcgtgattgtgatggcgcagaacgtaatggagcggaagggattgggctataccgaactgaattcttatttatggatcgtgaacagcttcccacagaagaagaacaatttattgcctataaacaagtggtagaagcaatgaacggacgtttaaccgtgcttcgtactatggatattggtggcgataaagagctttcatatttagatttaccaaaagaaatgaatccattcttgggatggcgtgcgattcgcattgcattagatcgtcgtgaaattttaaatgcacaattacgtgcggtgttacgtgcttcagcttttggtaaattggcggtaatgttcccgatgattatttctgtagaagaaattcgggaattaaaagcggttattgaagcattaaaagcggaattacgtgaagaggggagactgtttgataataatatccaagttggggtaatggtcgaaaccccctctgccgcggtaaatgcaaaatttttagcaaaagaagtagatttctttagtatcggtactaacgatttaactcaatatactttggctgtagatcgcggtaatgagtttatttcccatctttataatccgatgcacccctctgtgcttggtttaattaaacaagtgattgatgcctctcacgcagaaggaaaatggacgggaatgtgtggggaattagcaggggatgaacgtgcgactttattattgcttggtatgggattagatgaatttagtatgagtgcgatttctgtacctcgaattaaaaaattaatccgtaatgtaaattttcaagatgcaaaagtgcttgctgatactgcattacaaaaaccgactgctgcagaaattgatcaattaattgaagaatttttgctggaaaattcattaaattaa

SEQ ID NO: 3562 - protein, 575 aa, Haemophilus influenzae
MISGILASPGIAFGKALVLKEEKIVLDTQKITDDQIDAEVARFYEGRNAAVEQLNSIRERALISLGEEKAAIFEGHLMILEDEELEEEILDYLRSNKVNAGVAASKILDQQVTMLSEIDDEYLKERAGDIRDIANRLVKNILGMYIVDLGDIQEESILVAYDLTPSETAQLNLEKVLGVITDIGGRTSHTSIMARSLELPAIVGTNKVTKLVNTGDYLILDAINNQVYINPTASQIDELKALEAKISEEKAELAKLKDLPAITLDGHKVDVVANIGTIRDCDGAERNGAEGIGLYRTEFLFMDREQLPTEEEQFIAYKQVVEAMNGRLTVLRTMDIGGDKELSYLDLPKEMNPFLGWRAIRIALDRREILNAQLRAVLRASAFGKLAVMFPMIISVEEIRELKAVIEALKAELREEGRLFDNNIQVGVMVETPSAAVNAKFLAKEVDFFSIGTNDLTQYTLAVDRGNEFISHLYNPMHPSVLGLIKQVIDASHAEGKWTGMCGELAGDERATLLLLGMGLDEFSMSAISVPRIKKLIRNVNFQDAKVLADTALQKPTAAEIDQLIEEFLLENSLN

SEQ ID NO: 3563 - DNA, 279 bp, Haemophilus influenzae
ttgattagtcgaggtagcattatgtattcaaaagatgtggaaattattgcgccaaacggtttacacacgcgccctgctgcacaatttgtgaaagaagcgaaagcattttcttctgaaattacagtaacctctggggggaaaagtgcaagtgcaaagagcttatttaagttgcaaacattagctttaacgcagggaacaacacttaccatttctgctgatggagaagacgagcaacaggcagttgaatatttagttgcgttaattccaactttagaataa

SEQ ID NO: 3564 - protein, 92 aa, Haemophilus influenzae
MISRGSIMYSKDVEIIAPNGLHTRPAAQFVKEAKAFSSEITVTSGGKSASAKSLFKLQTLALTQGTTLTISADGEDEQQAVEYLVALIPTLE

SEQ ID NO: 3565 - DNA, 1041 bp, Haemophilus influenzae
atggctaaacgtaaattaactcaaaaccaaactagaagaattcaatcgaataatgtgaaaacattacatcgccacaagaaaaaagagattgaatggtcagatgaaatgctgggcgaatcgcaagaaggcgttgtggtcacacgttattctattcacgcagatgtcgaaaatgaacaaggcgaaatttatcgttgtaatttgcgtcgtactttgtcgagtttggtggtgggagataaagttgtttggcgtaaaggtaatgaacaattacaaggtgtgagcggcgtgattgaggcgattcaccctcgagaaaatgaaatttcccgccctgattattatgatggtttgaaacccatcgcggcgaatattgatcgtattattattgtatcagcagtattgccaacgctttccttaaatattatcgatcgttatcttgttgtgtgtgaaatcgcgggaattacgcctctcattgttttgaataaagtggatttcttgacgcaggaacagcgtcaagaaattgaagaacaacttaaaatttaccaagatattggctatgaaattttaatgatttcagcaaagagcggtgaaaatatggaaaaattgaccgcacttttggcacaaggcacggcgatttttgttgggcaatctggtgttggtaaatcgagtttaattaatcatattttgcctagcgtaaacgctcaagtaggggatgtgagcgaaacatcagggttagggcagcataccacgacatcgtcacgtctttaccatttgccacaaggcggtaatttaattgattcgcccggaattagagaatttgggctttggcatttagatgcagagcaaatcacaaaaggctatcgagaatttcaatatgttttgggcacctgtaaattccgtgattgtaaacatttgagcgatccaggatgtgcgttgcgtgaagccgttgagcaaggcaaaatttcgcctgttcgttatgataactatcatcgattaattgaaagtttaagtgaaacaaaatcacaacgtcatttttcattagtttaa

SEQ ID NO: 3566 - protein, 346 aa, Haemophilus influenzae
MAKRKLTQNQTRRIQSNNVKTLHRHKKKEIEWSDEMLGESQEGVVVTRYSIHADVENEQGEIYRCNLRRTLSSLVVGDKVVWRKGNEQLQGVSGVIEAIHPRENEISRPDYYDGLKPIAANIDRIIIVSAVLPTLSLNIIDRYLVVCEIAGITPLIVLNKVDFLTQEQRQEIEEQLKIYQDIGYEILMISAKSGENMEKLTALLAQGTAIFVGQSGVGKSSLINHILPSVNAQVGDVSETSGLGQHTTTSSRLYHLPQGGNLIDSPGIREFGLWHLDAEQITKGYREFQYVLGTCKFRDCKHLSDPGCALREAVEQGKISPVRYDNYHRLIESLSETKSQRHFSLV

SEQ ID NO: 3567 - DNA, 549 bp, Haemophilus influenzae
atgccattcgataaacaaaatcttatttggattgatttagaaatgaccggtttagaaccggaaaaagaacgtattattgaaattgcgactattgtgacagataaaaatttaaatattttggcagagggcccagtattagcggttcatcagtctgatgaattactcaataaaatgaatgattggtgccaaaaaactcacagtgaaaacggcttaattgaacgcgtaaaagccagtaaacttaccgaacgtgcagcagaattacaaaccttagactttttaaaaaaatgggtgccaaaaggttcgtcgccaatttgcggtaacagcattgcccaagataaacgctttttagtgaaatatatgccagatttagccgattattttcattatcgtcatttagacgtaagtacgttaaaagaacttgctgcacgttggaaacctgaaattttagaaggctttaaaaaagagaatacgcatttagcactagatgacattcgagaatcaattaaagagctggcttattatcgcgaacacttcataaaattagattga

SEQ ID NO: 3568 - protein, 182 aa, Haemophilus influenzae
MPFDKQNLIWIDLEMTGLEPEKERIIEIATIVTDKNLNILAEGPVLAVHQSDELLNKMNDWCQKTHSENGLIERVKASKLTERAAELQTLDFLKKWVPKGSSPICGNSIAQDKRFLVKYMPDLADYFHYRHLDVSTLKELAARWKPEILEGFKKENTHLALDDIRESIKELAYYREHFIKLD

SEQ ID NO: 3569 - DNA, 1068 bp, Haemophilus influenzae
atgctgagtatttttgttacttttcttggcgcatttttaacattgattgtgatgcgaccacttgccaattggattggattagttgataagccaaactatcgtaaacgtcatcaaggcacaattccactaatcggtggcgtatcgctttttgttggaaatctttgctattatttgatggaatgggatcagcttcgattaccgtatctttatttgttcagtatttttgttttattggcgattgggattttagatgatcgctttgatattagcccttttttaagagcaggcattcaagcaatattggcgattttaatgatcgatcttgggaatgtttatcttgatcatcttggtcaaattttagggcctttccaattaacgctcggttctattgggctgattaccactgtctttgccactattgcgattattaatgcctttaatatgattgatggtattgatggattgcttgggggactctcttgtgtttcttttgcggcgattggtattttaatgtatcgagatgggcaaatggatatggcacattggagttttgctttaatcgtatcaattttaccttatttgatgctcaatctagggattccatttggaccaaaatataaggtgtttatgggggatgccgggagtacattaattggctttaccattatttggattttgttattaagtacgcaaggaaaagggcatcctatgaatccagtaaccgcactttggattattgcgattcctttgattgatatggttgcgattatttatcgccgtgtacgtaaaggtaaaagcccattccgtccagatcgtttacatgttcatcatttaatggtaagagcgggtttaacatcaagacaagcctttttattgattacgtttgtttctgcagtttgtgcaactatcggtattttaggggaagtttattatgtgaatgagtgggcgatgtttgttggctttttcattttatttttcctttatgtctattcaattacgcatgcatggcgaattacccgctgggtaagaagaatgaaacgtcgtgccaaacggttgaagaaagcataa

SEQ ID NO: 3570 - protein, 355 aa, Haemophilus influenzae
MLSIFVTFLGAFLTLIVMRPLANWIGLVDKPNYRKRHQGTIPLIGGVSLFVGNLCYYLMEWDQLRLPYLYLFSIFVLLAIGILDDRFDISPFLRAGIQAILAILMIDLGNVYLDHLGQILGPFQLTLGSIGLITTVFATIAIINAFNMIDGIDGLLGGLSCVSFAAIGILMYRDGQMDMAHWSFALIVSILPYLMLNLGIPFGPKYKVFMGDAGSTLIGFTIIWILLLSTQGKGHPMNPVTALWIIAIPLIDMVAIIYRRVRKGKSPFRPDRLHVHHLMVRAGLTSRQAFLLITFVSAVCATIGILGEVYYVNEWAMFVGFFILFFLYVYSITHAWRITRWVRRMKRRAKRLKKA

SEQ ID NO: 3571 - DNA, 2592 bp, Haemophilus influenzae
atgctgttttctccgacactatcttctcctttaacgccaagtgcggtcaaaattgaacgagaaaatctcaagcaatttgagctcgagaatttttcttgttattccatttttgagcttattgaaaatcgctgtgatttttatgatgccttattgattcaactttggctggaaatggagttaagtgaacaacaggagatttctttaattgcggtgggcggttatggacggcgtgagatgtttcctttgtcggatttagattttttgattttagtcgagcaaacccgaagcccaaagattgaagaaaagattacccaatttatccaatttttatgggattgcggttttgaggtgggaaatagtgttcgaaccttagcacaatgcgaatcggaaggaaaacaagatattacgattgccaccaatttattagaagcaagatttctcactggaaatcgaccgcactttgatgcgctaaatgaattggtaaaacgtgctgatttttggtcgaaagaagatttttttaatgccaaagtgcaagagcaaatagaacgttatcaacgttaccataatacggcttataaccttgagccagatattaagtacagccctggtggcttgcgtgatttgcatttgttgtattgggtggcgttgcgccattcgggggctttgacccttgaggctattttacaaagtggttttatttatcctcaagaatatcagcaactacaagaaagtcgtgcatttttatttaaagtgcggttcgctttgcatttgattttgaaacgttacgataatcgtctgttgtttgatcgccaaattaaagttagtgaattgttgggctttcgaggggaaggcaatccagctgtggaaaaaatgatgaaatgttttttccaagcattgcaccgaatttcgcttattagtaatttgttgattcagcattatcgagaaaatgtgctttcatcaaatcaggatactgtgatggaccaattagacgatgattttcaactgattaaccaatgcttatgtttgcgtaatagctttgtttttcaagaaaaaccagcgcgaattttagatctattcttttatttaacgcagtacgaacatgccaatattcattctgatactttgcgtcaattacaaatttccttagagcaattaccacaaaaattatgcgaaattcctgcagctcgggaaaaatttctgcgtttgtttaatcaacctaatgcaattaaacgtgcgtttatgccgatgcaccaatatggtgtattaactgcgtatcttccgcaatggcaagccattgagggcttaatgcaatttgatttgttccatatttatacggtggatgaacatacattgcgcgtgatgttgaaattggaaagttttctgtcacaggaaagtgcgcaagaacatcccattgctcatcgaatttttagccaactttctgaccgcactttactttatattgcggcgttgttccacgatattgcaaaagggcggggcggtgatcacgcagaacttggtgctgtggatgttgcagactttgcgcaattacatggtttagatcgccgagaaattgatacccttgcttggctcgtaaaatcccatttgctgatgtcaattacggcgcaacgccgtgatattcatgatcctgaagtcgtcatgaattttgcggaagccgtgcaaaatcaagttcgattagattatctgacctgtttaacggtggcggatatttgtgcaaccaatggtaatttatggaatagctggaaacgttcgctttttgcctctttatatgaatttactgaacagcaattttcacaaggcatgaaagaattgcttgattattcagaaaaatcggcagaaaaccgaaaacttgcacaacaaattttaacgcaggattattccgatattgcaccaatctcgattgagcaattatggactcgttgtccagaagattattttgttcgtaatacgccaaagcaaatcgcgtggcatacaagtttgctggtggatttcgttgaggcattattagtgaaaattagtaatcgcttttcacttggtggcacggaagtgtttatttattgccaagatcaaccgcacttatttaataaagtggtgagtaccattggggcaaaaaaattcagtatccacgatgcacagattattacgacacaagatggttatgtttttgatagctttatcatcacagaacttaacggagaattggttgaatttgatcgtcgccgagaactagagcaagccctaacagtagctcttcaaagtgaaaaattacccgcactttctattgtgcctaatcgccagcttcaacattttactgtacaaaccgatgtgcgttttttacaggaaaacaaaaaagaacatactgaaatggaactggttgcgttggataaagcagggttattagcccaagtgagccagatttttactgagttaaatctaaatttattaaatgcgaaaattaccaccgtaggcgaaaaagccgaggacttttttattttgacgaatcgatttgggcaagctctggattctcaacaaagagaaatattacgtaacgtgctgtatcgaaatattggatag

SEQ ID NO: 3572 - protein, 863 aa, Haemophilus influenzae
MLFSPTLSSPLTPSAVKIERENLKQFELENFSCYSIFELIENRCDFYDALLIQLWLEMELSEQQEISLIAVGGYGRREMFPLSDLDFLILVEQTRSPKIEEKITQFIQFLWDCGFEVGNSVRTLAQCESEGKQDITIATNLLEARFLTGNRPHFDALNELVKRADFWSKEDFFNAKVQEQIERYQRYHNTAYNLEPDIKYSPGGLRDLHLLYWVALRHSGALTLEAILQSGFIYPQEYQQLQESRAFLFKVRFALHLILKRYDNRLLFDRQIKVSELLGFRGEGNPAVEKMMKCFFQALHRISLISNLLIQHYRENVLSSNQDTVMDQLDDDFQLINQCLCLRNSFVFQEKPARILDLFFYLTQYEHANIHSDTLRQLQISLEQLPQKLCEIPAAREKFLRLFNQPNAIKRAFMPMHQYGVLTAYLPQWQAIEGLMQFDLFHIYTVDEHTLRVMLKLESFLSQESAQEHPIAHRIFSQLSDRTLLYIAALFHDIAKGRGGDHAELGAVDVADFAQLHGLDRREIDTLAWLVKSHLLMSITAQRRDIHDPEVVMNFAEAVQNQVRLDYLTCLTVADICATNGNLWNSWKRSLFASLYEFTEQQFSQGMKELLDYSEKSAENRKLAQQILTQDYSDIAPISIEQLWTRCPEDYFVRNTPKQIAWHTSLLVDFVEALLVKISNRFSLGGTEVFIYCQDQPHLFNKVVSTIGAKKFSIHDAQIITTQDGYVFDSFIITELNGELVEFDRRRELEQALTVALQSEKLPALSIVPNRQLQHFTVQTDVRFLQENKKEHTEMELVALDKAGLLAQVSQIFTELNLNLLNAKITTVGEKAEDFFILTNRFGQALDSQQREILRNVLYRNIG

SEQ ID NO: 3573 - DNA, 807 bp, Haemophilus influenzae
atggctattccaattagaactgaaaaagaaattgtaaaactgcgtgaggcatgcaaattggcttccgatgtgcttgtgatgattgaaccttacgtaaaagcaggcgtaaccacaggcgaacttgatcgcatttgccatgaatatatggtaaatgaacaaaaggttatccctgcttgtttgaattatcacggttttccaaaggcgacctgtatttccattaacgaagtcgtttgtcacggtattccaagtgacgataaagtgttaaaaaatggcgatattgtgaatattgatgttaccgtgattaaagacggttattttggcgataactcaaaaatgtatatcgtgggcggagaaacgaatattcgtagtaaaaaattagtggaagcggcacaagaagcattatatgttgggatacgcactgtaaaacccgatattcgtttaaatgaaataggtaaagccgtgcaaaaatatacggaaagccagactttcagcgttgtgcgtgaatattgcggacacggcgttggtacggaatttcactgcgaacctcaagtattgcattattacgccgatgatggcggcgtgattttaaaacccggaatggtgtttaccattgagccaatgattaacgcaggcaaaaaagaagtgcgcgtaatgggagatggttggacagtaaaaaccaaagatcgcagccattcagcacaatatgaacatcaacttgttgtcacggaaactggttgtgaagtaatgactatccgcgatgaagaaattgcagaaggtcgaatttcgcggattatggtgaatgtgtaa

SEQ ID NO: 3574 - protein, 268 aa, Haemophilus influenzae
MAIPIRTEKEIVKLREACKLASDVLVMIEPYVKAGVTTGELDRICHEYMVNEQKVIPACLNYHGFPKATCISINEVVCHGIPSDDKVLKNGDIVNIDVTVIKDGYFGDNSKMYIVGGETNIRSKKLVEAAQEALYVGIRTVKPDIRLNEIGKAVQKYTESQTFSVVREYCGHGVGTEFHCEPQVLHYYADDGGVILKPGMVFTIEPMINAGKKEVRVMGDGWTVKTKDRSHSAQYEHQLVVTETGCEVMTIRDEEIAEGRISRIMVNV

SEQ ID NO: 3575 - DNA, 345 bp, Haemophilus influenzae
atgatagatgatatggcggtgccactgacatttactgatgcagcggcaaataaagtaaaaagtttaatcagcgaagaagaaaatactgatttgaaattacgcgtgtatatcacagggggtggttgcagcggtttccaatatggttttacctttgatgaaaaagtcaatgacggcgatttaaccattgaaaaatcaggggttcaacttgtgattgacccgatgagcttacagtatttaattggtggcactgtcgattacacagaaggtttagagggttcacgttttactgtaaataatccaaatgccaccagcacttgtggctgtggttcatcctttagtatctaa

SEQ ID NO: 3576 - protein, 114 aa, Haemophilus influenzae
MIDDMAVPLTFTDAAANKVKSLISEEENTDLKLRVYITGGGCSGFQYGFTFDEKVNDGDLTIEKSGVQLVIDPMSLQYLIGGTVDYTEGLEGSRFTVNNPNATSTCGCGSSFSI

SEQ ID NO: 3577 - DNA, 354 bp, Haemophilus influenzae
atggattttcaatttacacattatcaaggcaatgtatccgtcaaatgttcaatggaacacattgcccttgctaactggttcaacacagaagtgcggtcaaattcagacaagattttaaccgcactttctactgcacaatcactctctgaaaatcaagaaaaaatcttaattggtgcggaatatacgttatttttaaatgctgatgaagtaatggtgcgtgccaacaatctcgccattgaatcagatgaaattttagaacaagatttccattattatgacgaagaaagccttgctttttgcggtacgcaagattttattcattttctccaatcttatgttgattttattgcttaa

SEQ ID NO: 3578 - protein, 117 aa, Haemophilus influenzae
MDFQFTHYQGNVSVKCSMEHIALANWFNTEVRSNSDKILTALSTAQSLSENQEKILIGAEYTLFLNADEVMVRANNLAIESDEILEQDFHYYDEESLAFCGTQDFIHFLQSYVDFIA

SEQ ID NO: 3579 - DNA, 2346 bp, Haemophilus influenzae
atgacttctcaacactccgctaaaaaatcatcgaaaaacacgccaaaaaataaccgcacttttaaaggttttttacttaaatttagcttcacagcacttgtcttaacgattttttacggcggttatctcgattggcaaattcgttctaaaatggacggtcaaatttggcatttgcctgcggaagtttatagtcgattagaaagtgtgaaaattgccgataatctcgcttttgatgaagtcattcaaattttattagataacgaatatcgccaaactacaatagttgccgcacctggcgatttcaaattagaagatgatagcattgtaatacttcgccgcgcttttcctttccccgataaagcagagcctcagcgagttttacgcttgcgttttaacaataataagttatctcgcattgaagatttagtcacagtcaaaactgttgatgaatttcgtcttgcaccaaagttgattgcgatgttgcaatcagacaacgaagatcgccttgctattcctttgcaaaattatccccgtttattaattgatacattaattttaacggaagatcgccgcttttatgaacataatggcattaatccagtggggattttacgtgcattaattgcgaatattcgtgcaggtcaaactgtacagggcggaagtacgctcactcaacaattagtcaaaaatttatttttatcgcgcgaacgcaccattacacgcaaagccaacgaagccttgatgtcattggtgttagattggcgttacgataaaaaccgaattctcgaaacctatctcaatgaaatttatctaggacaaaatggcgatacgcaaattcacggttttgaattagccagccaattctattttggtcgttcgattcgtgaaattagcttagatcaaattgcccttttagtggggatggtcaaaggcccttcactttataatccgtggcgtaatccgcaaaacgcgctcgaacgtcgcaacattgttttaaagctaatgcttgaacataaaatgatcggcgatgaactttatcaattattaagtcagcgacctttaggtgtgcaaaagaaagggcaaatctcgcgtaaatatcctgcatttattcaaactttacaggcggatttacgccgcgaactgggcgaacacaaaatatcaagcttacttggtgcacgtattttttccacaatggatttaaaacaacaagctcaagcagaaaatgcagtggtcaataccgtttcgcaattacaactgaaaatgaaaaatccccatttagagggagcgatgattataacggattatcgcacaggcgaaattcgtgcagtagttggcggtttacaaacgcaatatgcaggctttaatcgtgcattaatggcaaaacgtcagattggttctttagtaaaaccttctatttatttgaccgcactttctaacccagaacagttccgtttgaataccccaattaataaccaaccaataacaattaatgtcaaaggtaacccgccgtggcagccacgcaactatgacaaaaaatatagtgattcagtaatgttaatggatgccttagcccgttctttaaatattcccactgtaaatattggtatgaaagttggcttgagcaaagtcattgacacgcaaaaagcgatgggctgggacaacgtggaaattcctaaagtgcctgcgatgttgctcggttcttataccatctcgccttatgatgtcacaaaactttatcaaacccttgccaatcaaggtgggagaattgcgcttacaaccgtcgatagtattgcagatcgtcaaggtaacctaatttttcaacacgataaaagtgcaaaacaagtggtgccacaagaagcggcattccaaaccttatttgcaatgcaacaaactgttgaacgtggtacagctcgcagtttgcaaaaggattacgctgatttacatttagcaggcaaaacaggcacaaccaatgaatcacgcgatacgtggtttgtgggaattgacggaaaaaatatcagcaccgtctggcttggtcgcgatgataatggcgaaacaaaactgactggtgcttctggcgcattgcaaatttataaagattatttaaaccgtacaaatattgaaaaattaacaattactccccctacaacagtgaaatgggtggggataaatcaatacggtgactgggattgtgagagttatcgaacaattcctgtttggctaaataatggtcagaatttctgtggcgaaacatcatctccctctctcacgccaacaactgaaacagaaacaccaccacaagaaagcctgtgggacgtattggataatcccaatccacccgctcaataa

SEQ ID NO: 3580 - protein, 781 aa, Haemophilus influenzae
MTSQHSAKKSSKNTPKNNRTFKGFLLKFSFTALVLTIFYGGYLDWQIRSKMDGQIWHLPAEVYSRLESVKIADNLAFDEVIQILLDNEYRQTTIVAAPGDFKLEDDSIVILRRAFPFPDKAEPQRVLRLRFNNNKLSRIEDLVTVKTVDEFRLAPKLIAMLQSDNEDRLAIPLQNYPRLLIDTLILTEDRRFYEHNGINPVGILRALIANIRAGQTVQGGSTLTQQLVKNLFLSRERTITRKANEALMSLVLDWRYDKNRILETYLNEIYLGQNGDTQIHGFELASQFYFGRSIREISLDQIALLVGMVKGPSLYNPWRNPQNALERRNIVLKLMLEHKMIGDELYQLLSQRPLGVQKKGQISRKYPAFIQTLQADLRRELGEHKISSLLGARIFSTMDLKQQAQAENAVVNTVSQLQLKMKNPHLEGAMIITDYRTGEIRAVVGGLQTQYAGFNRALMAKRQIGSLVKPSIYLTALSNPEQFRLNTPINNQPITINVKGNPPWQPRNYDKKYSDSVMLMDALARSLNIPTVNIGMKVGLSKVIDTQKAMGWDNVEIPKVPAMLLGSYTISPYDVTKLYQTLANQGGRIALTTVDSIADRQGNLIFQHDKSAKQVVPQEAAFQTLFAMQQTVERGTARSLQKDYADLHLAGKTGTTNESRDTWFVGIDGKNISTVWLGRDDNGETKLTGASGALQIYKDYLNRTNIEKLTITPPTTVKWVGINQYGDWDCESYRTIPVWLNNGQNFCGETSSPSLTPTTETETPPQESLWDVLDNPNPPAQ

SEQ ID NO: 3581 - DNA, 102 bp, Haemophilus influenzae
gtgtcattgttttgcacctgtatgaaagtaaaaactggtgcgtattgtaccgcacttttaaatcaaataaagcaaacgtttgctatttttaaaaagaaataa

SEQ ID NO: 3582 - protein, 33 aa, Haemophilus influenzae
MSLFCTCMKVKTGAYCTALLNQIKQTFAIFKKK

SEQ ID NO: 3583 - DNA, 873 bp, Haemophilus influenzae
atgacacaacaactccccattttaagtctaaaaaaaatctattcaggcaaagtacgcgatctctatgaaatcgatgataaacgtatgttaatggttgcttctgaccgcttatctgcctttgatgttattttagatgatcccattccacgaaaaggcgaaatcctaactcaaatttccaatttttggtttaataaacttgctcacattatgcccaatcatttcactggcgacagcgtttatgatgtgctaccaaaagaagaagcggatttaatcagagatcgcgccgtcgtgtgtaaacgtttgaatcccattaaaattgaatctatcgtacgtggttatttaactggcagtggtttaaaagattacaaacaaactggcacgatttgcggattaaaattgcctgaaggcttggtggaagcgagtaaattacccgaagctattttcacgccatcaagcaaagaagaagttggcaaccacgatataaatatcagctatgcagaatgcgaaaaacttatcggggctgatttagccgcacaagtaaaagaaaaagctatcgcactttataccgaagcttcagaatatgcactcactaaagggattattatttgcgacacaaaatttgaatttggtttagatgaaaatggcacgctcactttaatggacgaagtattaacgccagactctagccgtttttggtctgtggatacttaccaagcaggaacaaatcccccatcattcgataaacaatttgtgcgcgattggttagaaaatagcggctggaataaacaagctcccgcaccaaaagtgccagaaaatattattcagaaaaccgttgataaatatcaagaagcactggatttattaacaaaatga

SEQ ID NO: 3584 - protein, 290 aa, Haemophilus influenzae
MTQQLPILSLKKIYSGKVRDLYEIDDKRMLMVASDRLSAFDVILDDPIPRKGEILTQISNFWFNKLAHIMPNHFTGDSVYDVLPKEEADLIRDRAVVCKRLNPIKIESIVRGYLTGSGLKDYKQTGTICGLKLPEGLVEASKLPEAIFTPSSKEEVGNHDINISYAECEKLIGADLAAQVKEKAIALYTEASEYALTKGIIICDTKFEFGLDENGTLTLMDEVLTPDSSRFWSVDTYQAGTNPPSFDKQFVRDWLENSGWNKQAPAPKVPENIIQKTVDKYQEALDLLTK

SEQ ID NO: 3585 - DNA, 1335 bp, Haemophilus influenzae
atgtcaaatactattctacagaatttacctaaaggacaaaaagtagggatcgctttctctggtggtttagacactagcgcagcattactttggatgcgtcaaaaaggcgcagtgccttatgcctacaccgctaatttagggcaacccgatgaagatgattacaatgcaatccctaaaaaagccatggcgtatggtgcagaaaacgcgcgattaattgattgtcgtgctcagcttgctcatgaaggcattgccgcaattcaatgtggtgcattccatatttctacaggcggcattccttacttcaatacaacgcctcttggtcgcgcagtaacaggcacaatgctcgttgcagcaatgaaagaagatgatgtaaacatttggggcgacggctcgactttcaaagggaatgatattgaacgtttctatcgttatggtttattaacgaacccgaatttaaaaatctataaaccttggttagatgcacaatttattgaagaacttggcggtcgtttagaaatgtctcaatttcttattgaaaatggttttgactataaaatgtccgttgaaaaagcctattccactgattccaatatgctcggcgcaacccatgaagcaaaagacttagagcaattaagcacaggcatgaaaattgttaaaccaattatgggtgtcgcattttgggatgagaatgtagaaattaaaccagaaacagtcaccgtcacttttgaagaaggtgtccctatcgcattaaatggtaaacgttttgataatgcagttgatattattctggaagccaatcgtatcggtggtcgtcatggtttaggaatgtcagaccaaatcgaaaatcgtattattgaagccaaatctcgtggtatttatgaagcaccagggatggcattattacatatcgcttacgaacgtttagtcacaggtattcacaatgaagataccatcgaacaatatcgtattaatggcattcgcttaggtcgtttgttatatcaaggtcgttggtttgatccgcaagcattaatgttgcgtgaaacagcacaacgttgggtggcaaaagcaattacaggcacagtaacccttgaacttcgtcgtggtaacgacttcacaattttaaataccgaatcgccaaacttaacctacgaagcagagcgtttaagtatggaaaaagtggaagatgcgccatttgatccaattgatcgtatcggtcaattaacaatgcgtaatttagatgtatcagacacccgaggtaaacttggcatctatgcacaaacaggtttattaagcgcaattaaagattccgtattgccacaattaggcaaaaaataa

SEQ ID NO: 3586 - protein, 444 aa, Haemophilus influenzae
MSNTILQNLPKGQKVGIAFSGGLDTSAALLWMRQKGAVPYAYTANLGQPDEDDYNAIPKKAMAYGAENARLIDCRAQLAHEGIAAIQCGAFHISTGGIPYFNTTPLGRAVTGTMLVAAMKEDDVNIWGDGSTFKGNDIERFYRYGLLTNPNLKIYKPWLDAQFIEELGGRLEMSQFLIENGFDYKMSVEKAYSTDSNMLGATHEAKDLEQLSTGMKIVKPIMGVAFWDENVEIKPETVTVTFEEGVPIALNGKRFDNAVDIILEANRIGGRHGLGMSDQIENRIIEAKSRGIYEAPGMALLHIAYERLVTGIHNEDTIEQYRINGIRLGRLLYQGRWFDPQALMLRETAQRWVAKAITGTVTLELRRGNDFTILNTESPNLTYEAERLSMEKVEDAPFDPIDRIGQLTMRNLDVSDTRGKLGIYAQTGLLSAIKDSVLPQLGKK

SEQ ID NO: 3587 - DNA, 1194 bp, Haemophilus influenzae
atggcatcaattactcacagacgaaatgcggttttaggggcggctttcttaatggcgacatccgccattgggcccgggtttttaactcaaaccgcaacctttaccaatactttattagcgagttttggctttgttattttattatcaattttgttagatattggtgctcaacttaatatttggcgaattgttattgtgtctggcaaacgcgcgcaagatatttctaatgcggtttttccgaaagcagggtattttcttgctgcgctgattgtgatgggcggactggcttttaacattggtaatgttggcggtgcggggcttggtttaaattctatttttggcatagcaccagaaataggcgcagtgattagcggtattattgctattttgatttttttgcgtaaagaagcgggcttattaatggatcgttttgcacaattaatgggctttattatggtcgcactcacgttttatgtaatgtttaaaactgaaccgcctgtggctgaagcggcatatcattcctttattccagaacaaattgatcccattgctattgtcacattagtggggggaaccgtaggtggttatattacttttgcaggcgcgcatcgcttattagatgctggcattcaaggcgaaaaagcaatagctgaagtgagccgtagttctgtttcagccattttaattgcttcaacgatgcgtattgtattatttcttgcggtacttggcgtggtgtcaaaaggtgtgtctcttaatcctaaaaatccagctgaaacgccttttgaatatgtagcaggcaattttggtcaagtgttatttggggtagttatttgggcagcgtctattacatcggttattggtgcggcttatacttcagtttctttcttaacgaccctttgtccaactattgaacgcaatcgtaatcgttggattattgcctttattgtgatttctaccgttgttttagtcacagtgggaaaacctgctgcggtattagtttttgtgggaacattaaatggcttaatactgccgattgcattggcattaattttgttagccgcttatcgaagtgatattgttggcacttataaacaccctgtttttttagctttttcaggctggtttgttgtgattattatggcaatattaagtggaaaaacgattatttcttatatttctagtttttttagctaa

SEQ ID NO: 3588 - protein, 397 aa, Haemophilus influenzae
MASITHRRNAVLGAAFLMATSAIGPGFLTQTATFTNTLLASFGFVILLSILLDIGAQLNIWRIVIVSGKRAQDISNAVFPKAGYFLAALIVMGGLAFNIGNVGGAGLGLNSIFGIAPEIGAVISGIIAILIFLRKEAGLLMDRFAQLMGFIMVALTFYVMFKTEPPVAEAAYHSFIPEQIDPIAIVTLVGGTVGGYITFAGAHRLLDAGIQGEKAIAEVSRSSVSAILIASTMRIVLFLAVLGVVSKGVSLNPKNPAETPFEYVAGNFGQVLFGVVIWAASITSVIGAAYTSVSFLTTLCPTIERNRNRWIIAFIVISTVVLVTVGKPAAVLVFVGTLNGLILPIALALILLAAYRSDIVGTYKHPVFLAFSGWFVVIIMAILSGKTIISYISSFFS

SEQ ID NO: 3589 - DNA, 738 bp, Haemophilus influenzae
atgaaaaaaattgatttaaatgcagatattgcagagggttttccttttgatgaaagtttgttgcagttgctttcttctgcaaatattgcctgtggcttacacgctgggggtgcaaaggaaatgcaaagtgcggtcaaatttgcgaaagaaaatcaggtgcgtattggcgcacaccctagttttcctgatcgcgaaaactttggtcgtacagcaatggcgttgtcttcacaggaattaatcgcacatttgcgttatcaattaggtgcattaaaagcaatttgtgatggcgagggggcggtaattagttatgttaagcctcacggtgcgttatataaccaagcggcaaaagatgaaaaaatagcgcgtgtaattgcacaaactgtttatcaatttgatccgaatttgaaattaatggggttagcgggtagtttaatgttgcgtatcgcagaggaagaagggttgcaaactatttctgaagtgtttgccgatcgacattatatgcctgatgggagtttagtgcctcgttctcaaccaaatgcaatggtaaaatctgataaggaagctattcaacaagtgttacaaatggtaacaaaggggcaagtcaatgccattgatggaagcctcgtgcctgtaaaagcagaaagtatttgcttacacggcgataatcaacattctttgcaatttgctaaacgcattgtggaagaattagaaaaaaatcatatcaaaataacggcataa

SEQ ID NO: 3590 - protein, 245 aa, Haemophilus influenzae
MKKIDLNADIAEGFPFDESLLQLLSSANIACGLHAGGAKEMQSAVKFAKENQVRIGAHPSFPDRENFGRTAMALSSQELIAHLRYQLGALKAICDGEGAVISYVKPHGALYNQAAKDEKIARVIAQTVYQFDPNLKLMGLAGSLMLRIAEEEGLQTISEVFADRHYMPDGSLVPRSQPNAMVKSDKEAIQQVLQMVTKGQVNAIDGSLVPVKAESICLHGDNQHSLQFAKRIVEELEKNHIKITA

SEQ ID NO: 3591 - DNA, 930 bp, Haemophilus influenzae
atgattgatgtgcttgatgtgcaatcccgcgcgactattcaagatttaggacgttttggtttacgccgatttggtattagccattgtggggcaatggataaattagccttacgtgcaggcaatattttattgggcaatgcagagaacgttcctgccattgaagtgcctttaggtggcattacattgcaatttcagcaagatatgaatttttgtgtgactggtgctttttatgaaatgacgttagatgataagcctgtttttgcttattggcgttatcaagcacgtgccggtcaaatattaaaaatgacccgtgcaaaaattggaatgtatggttatttatgtgttcaaggcggttttgttttgcctcaagcattgaattcttgtagtacggatttgagagcgaaaatagggggcattgagggacgttgtttgcagacaggcgatcagctacaaacggcaaatgatcatattttgcgtagcgaaattggtgttgcgccgattccgcttagcgatgttattcgtgctttgccatcttctgaatatcaggcgtttaaacgaaaatcccagtattattggtggcgaaatgaatggacgttgcaaagtaatagtgatcgtatggggtatcgttttcaaggtcagaaattagaattaaagcagccgttggaaatgctatctcacgccattcagtttggtagtgtgcaagttccaccaagtggtcagcctattattttgatggcggatgcacaaaccacaggcggttatcctaaaattgctaatgtgattgatgccgatcttggggctttggcacaggtgcgtttaggttcaacgattaaatttgaagcggttagcttacaagaggctgctaaattacgccgtaaaaatgaaatataccttgatcaaattaggagaattgttgatgaaaaaaattga

SEQ ID NO: 3592 - protein, 309 aa, Haemophilus influenzae
MIDVLDVQSRATIQDLGRFGLRRFGISHCGAMDKLALRAGNILLGNAENVPAIEVPLGGITLQFQQDMNFCVTGAFYEMTLDDKPVFAYWRYQARAGQILKMTRAKIGMYGYLCVQGGFVLPQALNSCSTDLRAKIGGIEGRCLQTGDQLQTANDHILRSEIGVAPIPLSDVIRALPSSEYQAFKRKSQYYWWRNEWTLQSNSDRMGYRFQGQKLELKQPLEMLSHAIQFGSVQVPPSGQPIILMADAQTTGGYPKIANVIDADLGALAQVRLGSTIKFEAVSLQEAAKLRRKNEIYLDQIRRIVDEKN

SEQ ID NO: 3593 - DNA, 642 bp, Haemophilus influenzae
atgaatatcgttccgatcagtgagtcggcggtggtttgctctttgccacccccagcttccattcaacaacaacgccaattatgggcgttcgctcgtcaattgcaatcagaacaagatattgtagaagttgtcttgggaatgaataatcttacggtttttaccgattttttcgtagattttaagccgcttgtgcaacgtttagaacaactttgggctgaattgaaagtatcggattttcaaggacgccatattgaaattcctgttatttatgggggagagcgaggccaggatttatctgatgtagcgaaatttcatcagacaacaccagagcggattattcagatgcacagtgagcctatttatactgtgtatatgattggtttccaagcgggctttccttatttgggtggtttacctgaaaatttacacacgccacgccgtgccacgccaagaacggttgttcctgctggttctgttggtattgggggcgcgcaaacggggatttatccttttgcttcgccaggtgggtggcagttgatcggttatactaaggaagcactttttgataaaaatcaagcacaaccaaccttattacaagctggcgatactgtgaaatttattgtggaggggattgaactatga

SEQ ID NO: 3594 - protein, 213 aa, Haemophilus influenzae
MNIVPISESAVVCSLPPPASIQQQRQLWAFARQLQSEQDIVEVVLGMNNLTVFTDFFVDFKPLVQRLEQLWAELKVSDFQGRHIEIPVIYGGERGQDLSDVAKFHQTTPERIIQMHSEPIYTVYMIGFQAGFPYLGGLPENLHTPRRATPRTVVPAGSVGIGGAQTGIYPFASPGGWQLIGYTKEALFDKNQAQPTLLQAGDTVKFIVEGIEL

SEQ ID NO: 3595 - DNA, 7242 bp, Haemophilus influenzae
atgaacaaaatttttaacgttatttggaatgttatgactcaaacttgggttgtcgtatctgaactcactcgcacccacaccaaacgcgcctccgcaaccgtggagaccgccgtattggcgacactgttgtttgcaacggttcaggcgaatgctaccgatgaagatgaagagttagaccccgtagtacgcactgctcccgtgttgagcttccattccgataaagaaggcacgggagaaaaagaagttacagaaaattcaaattggggaatatatttcgacaataaaggagtactaaaagccggagcaatcaccctcaaagccggcgacaacctgaaaatcaaacaaaacaccgatgaaagcaccaatgccagtagcttcacctactcgctgaaaaaagacctcacagatctgaccagtgttgcaactgaaaaattatcgtttggcgcaaacggcgataaagttgatattaccagtgatgcaaatggcttgaaattggcgaaaacaggtaacggaaatgttcatttgaatggtttggattcaactttgcctgatgcggtaacgaatacaggtgtgttaagttcatcaagttttacacctaatgatgttgaaaaaacaagagctgcaactgttaaagatgttttaaatgcaggttggaacattaaaggtgctaaaactgctggaggtaatgttgagagtgttgatttagtgtccgcttataataatgttgaatttattacaggcgataaaaacacgcttgatgttgtattaacagctaaagaaaacggtaaaacaaccgaagtgaaattcacaccgaaaacctctgttatcaaagaaaaagacggtaagttatttactggaaaagagaataacgacacaaataaagttacaagtaacacggcgactgataatacagatgagggtaatggcttagtcactgcaaaagctgtgattgatgctgtgaacaaggctggttggagagttaaaacaactactgctaatggtcaaaatggcgacttcgcaactgttgcgtcaggcacaaatgtaacctttgaaagtggcgatggtacaacagcgtcagtaactaaagatactaacggcaatggcatcactgttaagtacgacgcgaaagttggcgacggcttgaaatttgatagcgataaaaaaatcgttgcagatacgaccgcacttactgtgacaggtggtaaggtagctgaaattgctaaagaagatgacaagaaaaaacttgttaatgcaggcgatttggtaacagctttaggtaatctaagttggaaagcaaaagctgaggctgatactgatggtgcgcttgaggggatttcaaaagaccaagaagtcaaagcaggcgaaacggtaacctttaaagcgggcaagaacttaaaagtgaaacaggatggtgcgaactttacttattcactgcaagatgctttaacgggtttaacgagcattactttaggtggtacaactaatggcggaaatgatgcgaaaaccgtcatcaacaaagacggtttaaccatcacgccagcaggtaatggcggtacgacaggtacaaacaccatcagcgtaaccaaagatggcattaaagcaggtaataaagctattactaatgttgcgagtggtttaagagcttatgacgatgcgaattttgatgttttaaataactctgcaactgatttaaatagacacgttgaagatgcttataaaggtttattaaatctaaatgaaaaaaatgcaaataaacaaccgttggtgactgacagcacggcggcgactgtaggcgatttacgtaaattgggttgggtagtatcaaccaaaaacggtacgaaagaagaaagcaatcaagttaaacaagctgatgaagtcctctttaccggagccggtgctgctacggttacttccaaatctgaaaacggtaaacatacgattaccgttagtgtggctgaaactaaagcggatagcggtcttgaaaaagatggcgatactattaagctcaaagtggataatcaaaacactgataatgttttaactgttggtaataatggtactgctgtcactaaaggtggctttgaaactgttaaaactggagcgactgatgcagatcgcggtaaagtaactgtaaaagatgctactgctaatgacgctgataagaaagtcgcaactgtaaaagatgttgcaaccgcaattaatagtgcggcgacttttgtgaaaacagagaatttaactacctctattgatgaagataatcctacagataacggcaaagatgacgcacttaaagcgggcgataccttaacctttaaagcaggtaaaaacctgaaagttaaacgtgatggaaaaaatattacttttgacttggcgaaaaaccttgaggtgaaaactgcgaaagtgagtgatactttaacgattggcgggaatacacctacaggtggcactactgcgacgccaaaagtgaatattactagcacggctgatggtttgaattttgcaaaagaaacagccgatgcctcgggttctaagaatgtttatttgaaaggtattgcgacaactttaactgagccaagcgcgggagcgaagtcttcacacgttgatttaaatgtggatgcgacgaaaaaatccaatgcagcaagtattgaagatgtattgcgcgcaggttggaatattcaaggtaatggtaataatgttgattatgtagcgacgtatgacacagtaaactttaccgatgacagcacaggtacaacaacggtaaccgtaacccaaaaagcagatggcaaaggtgctgacgttaaaatcggtgcgaaaacttctgttatcaaagaccacaacggcaaactgtttacaggcaaagacctgaaagatgcgaataatggtgcaaccgttagtgaagatgatggcaaagacaccggcacaggcttagttactgcaaaaactgtgattgatgcagtaaataaaagcggttggagggtaaccggtgagggcgcgactgccgaaaccggtgcaaccgccgtgaatgcgggtaacgctgaaaccgttacatcaggcacgagcgtgaacttcaaaaacggcaatgcgaccacagcgaccgtaagcaaagataatggcaacatcaatgtcaaatacgatgtaaatgttggtgacggcttgaagattggcgatgacaaaaaaatcgttgcagacacgaccacacttactgtaacaggtggtaaggtgtctgttcctgctggtgctaatagtgttaataacaataagaaacttgttaatgcagagggtttagcgactgctttaaacaacctaagctggacggcaaaagccgataaatatgcagatggcgagtcagagggcgaaaccgaccaagaagtcaaagcaggcgacaaagtaacctttaaagcaggcaagaacttaaaagtgaaacagtctgaaaaagactttacttattcactgcaagacactttaacaggcttaacgagcattactttaggtggtacagctaatggcagaaatgatacgggaaccgtcatcaacaaagacggcttaaccatcacgctggcaaatggtgctgcggcaggcacagatgcgtctaacggaaacaccatcagtgtaaccaaagacggcattagtgcgggtaataaagaaattaccaatgttaagagtgctttaaaaacctataaagatactcaaaacactgcaggtgcaactcaacctgcggctaatacagctgaagtagccaaacaagacttggttgatttaactaaacctgcgacaggtgcagctggaaatggtgcagatgcaaaagctcccgataccacagctgcaaccgtaggcgacttgcgtggtttgggctgggtgctttcagctaagaaaactgcagatgaaacacaagataaagagttccacgccgccgttaaaaacgcaaatgaagttgagttcgtgggtaaaaacggtgcaaccgtgtctgcaaaaactgataacaacggaaaacatactgtaacgattgatgttgcagaagccaaagttggtgatggtcttgaaaaagatactgacggcaagattaaactcaaagtagataatacagatgggaataatctattaaccgttgatgcaacaaaaggtgcatccgttgccaagggcgagtttaatgccgtaacaacagatgcaactacagcccaaggcacaaatgccaatgagcgcggtaaagtggttgtcaagggttcaaatggtgcaactgctaccgaaactgacaagaaaaaagtggcaactgttggcgacgttgctaaagcgattaacgacgcagcaactttcgtgaaagtggaaaatgacgacagtgctacgattgatgatagcccaacagatgatggcgcaaatgatgctctcaaagcaggcgacaccttgaccttaaaagcgggtaaaaacttaaaagttaaacgtgatggtaaaaatattacttttgcccttgcgaacgaccttagtgtaaaaagcgcaaccgttagcgataaattatcgcttggtacaaacggcaataaagtcaatatcacaagcgacaccaaaggcttgaacttcgctaaagatagtaagacaggcgatgatgctaatattcacttaaatggcattgcttcaactttaactgatacattgttaaatagtggtgcgacaaccaatttaggtggtaatggtattactgataacgagaaaaaacgcgcggcgagcgttaaagatgtcttgaatgcgggttggaatgttcgtggtgttaaaccggcatctgcaaataatcaagtggagaatatcgactttgtagcaacctacgacacagtggactttgttagtggagataaagacaccacgagtgtaactgttgaaagtaaagataatggcaagagaaccgaagttaaaatcggtgcgaagacttctgttatcaaagaccacaacggcaaactgtttacaggcaaagagctgaaggatgctaacaataatggcgtaactgttaccgaaaccgacggcaaagacgagggtaatggtttagtgactgcaaaagctgtgattgatgccgtgaataaggctggttggagagttaaaacaacaggtgctaatggtcagaatgatgacttcgcaactgttgcgtcaggcacaaatgtaacctttgctgatggtaatggcacaactgccgaagtaactaaagcaaacgacggtagtattactgttaaatacaatgttaaagtggctgatggcttaaaactagacggcgataaaatcgttgcagacacgaccgtacttactgtggcagatggtaaagttacagctccgaataatggcgatggtaagaaatttgttgatgcaagtggtttagcggatgcgttaaataaattaagctggacggcaactgctggtaaagaaggcactggtgaagttgatcctgcaaattcagcagggcaagaagtcaaagcgggcgacaaagtaacctttaaagccggcgacaacctgaaaatcaaacaaagcggcaaagactttacctactcgctgaaaaaagagctgaaagacctgaccagcgtagagttcaaagacgcaaacggcggtacaggcagtgaaagcaccaagattaccaaagacggcttgaccattacgccggcaaacggtgcgggtgcggcaggtgcaaacactgcaaacaccattagcgtaaccaaagatggcattagcgcgggtaataaagcagttacaaacgttgtgagcggactgaagaaatttggtgatggtcatacgttggcaaatggcactgttgctgattttgaaaagcattatgacaatgcctataaagacttgaccaatttggatgaaaaaggcgcggataataatccgactgttgccgacaataccgctgcaaccgtgggcgatttgcgcggcttgggctgggtcatttctgcggacaaaaccacaggcgaacccaatcaggaatacaacgcgcaagtgcgtaacgccaatgaagtgaaattcaagagcggcaacggtatcaatgtttccggtaaaacattgaacggtacgcgcgtgattacctttgaattggctaaaggcgaagtggttaaatcgaatgaatttaccgttaagaatgccgatggttcggaaacgaacttggttaaagttggcgatatgtattacagcaaagaggatattgacccggcaaccagtaaaccgatgacaggtaaaactgaaaaatataaggttgaaaacggcaaagtcgtttctgctaacggcagcaagaccgaagttaccctaaccaacaaaggttccggctatgtaacaggtaaccaagtggctgatgcgattgcgaaatcaggctttgagcttggtttggctgatgcggcagaagctgaaaaagcctttgcagaaagcgcaaaagacaagcaattgtctaaagataaagcggaaactgtaaatgcccacgataaagtccgttttgctaatggtttaaataccaaagtgagcgcggcaacggtggaaagcactgatgcaaacggcgataaagtgaccacaacctttgtgaaaaccgatgtggaattgcctttaacgcaaatctacaataccgatgcaaacggtaataagatcgttaaaaaagctgacggaaaatggtatgaactgaatgctgatggtacggcgagtaacaaagaagtgacacttggtaacgtggatgcaaacggtaagaaagttgtgaaagtaaccgaaaatggtgcggataagtggtattacaccaatgctgacggtgctgcggataaaaccaaaggcgaagtgagcaatgataaagtttctaccgatgaaaaacacgttgtccgccttgatccgaacaatcaatcgaacggcaaaggcgtggtcattgacaatgtggctaatggcgaaatttctgccacttccaccgatgcgattaacggaagtcagttgtatgccgtggcaaaaggggtaacaaaccttgctggacaagtgaataatcttgagggcaaagtgaataaagtgggcaaacgtgcagatgcaggtacagcaagtgcattagcggcttcacagttaccacaagccactatgccaggtaaatcaatggttgctattgcgggaagtagttatcaaggtcaaaatggtttagctatcggggtatcaagaatttccgataatggcaaagtgattattcgcttgtcaggcacaaccaatagtcaaggtaaaacaggcgttgcagcaggtgttggttaccagtggtaa

SEQ ID NO: 3596 - protein, 2413 aa, Haemophilus influenzae
MNKIFNVIWNVMTQTWVVVSELTRTHTKRASATVETAVLATLLFATVQANATDEDEELDPVVRTAPVLSFHSDKEGTGEKEVTENSNWGIYFDNKGVLKAGAITLKAGDNLKIKQNTDESTNASSFTYSLKKDLTDLTSVATEKLSFGANGDKVDITSDANGLKLAKTGNGNVHLNGLDSTLPDAVTNTGVLSSSSFTPNDVEKTRAATVKDVLNAGWNIKGAKTAGGNVESVDLVSAYNNVEFITGDKNTLDVVLTAKENGKTTEVKFTPKTSVIKEKDGKLFTGKENNDTNKVTSNTATDNTDEGNGLVTAKAVIDAVNKAGWRVKTTTANGQNGDFATVASGTNVTFESGDGTTASVTKDTNGNGITVKYDAKVGDGLKFDSDKKIVADTTALTVTGGKVAEIAKEDDKKKLVNAGDLVTALGNLSWKAKAEADTDGALEGISKDQEVKAGETVTFKAGKNLKVKQDGANFTYSLQDALTGLTSITLGGTTNGGNDAKTVINKDGLTITPAGNGGTTGTNTISVTKDGIKAGNKAITNVASGLRAYDDANFDVLNNSATDLNRHVEDAYKGLLNLNEKNANKQPLVTDSTAATVGDLRKLGWVVSTKNGTKEESNQVKQADEVLFTGAGAATVTSKSENGKHTITVSVAETKADSGLEKDGDTIKLKVDNQNTDNVLTVGNNGTAVTKGGFETVKTGATDADRGKVTVKDATANDADKKVATVKDVATAINSAATFVKTENLTTSIDEDNPTDNGKDDALKAGDTLTFKAGKNLKVKRDGKNITFDLAKNLEVKTAKVSDTLTIGGNTPTGGTTATPKVNITSTADGLNFAKETADASGSKNVYLKGIATTLTEPSAGAKSSHVDLNVDATKKSNAASIEDVLRAGWNIQGNGNNVDYVATYDTVNFTDDSTGTTTVTVTQKADGKGADVKIGAKTSVIKDHNGKLFTGKDLKDANNGATVSEDDGKDTGTGLVTAKTVIDAVNKSGWRVTGEGATAETGATAVNAGNAETVTSGTSVNFKNGNATTATVSKDNGNINVKYDVNVGDGLKIGDDKKIVADTTTLTVTGGKVSVPAGANSVNNNKKLVNAEGLATALNNLSWTAKADKYADGESEGETDQEVKAGDKVTFKAGKNLKVKQSEKDFTYSLQDTLTGLTSITLGGTANGRNDTGTVINKDGLTITLANGAAAGTDASNGNTISVTKDGISAGNKEITNVKSALKTYKDTQNTAGATQPAANTAEVAKQDLVDLTKPATGAAGNGADAKAPDTTAATVGDLRGLGWVLSAKKTADETQDKEFHAAVKNANEVEFVGKNGATVSAKTDNNGKHTVTIDVAEAKVGDGLEKDTDGKIKLKVDNTDGNNLLTVDATKGASVAKGEFNAVTTDATTAQGTNANERGKVVVKGSNGATATETDKKKVATVGDVAKAINDAATFVKVENDDSATIDDSPTDDGANDALKAGDTLTLKAGKNLKVKRDGKNITFALANDLSVKSATVSDKLSLGTNGNKVNITSDTKGLNFAKDSKTGDDANIHLNGIASTLTDTLLNSGATTNLGGNGITDNEKKRAASVKDVLNAGWNVRGVKPASANNQVENIDFVATYDTVDFVSGDKDTTSVTVESKDNGKRTEVKIGAKTSVIKDHNGKLFTGKELKDANNNGVTVTETDGKDEGNGLVTAKAVIDAVNKAGWRVKTTGANGQNDDFATVASGTNVTFADGNGTTAEVTKANDGSITVKYNVKVADGLKLDGDKIVADTTVLTVADGKVTAPNNGDGKKFVDASGLADALNKLSWTATAGKEGTGEVDPANSAGQEVKAGDKVTFKAGDNLKIKQSGKDFTYSLKKELKDLTSVEFKDANGGTGSESTKITKDGLTITPANGAGAAGANTANTISVTKDGISAGNKAVTNVVSGLKKFGDGHTLANGTVADFEKHYDNAYKDLTNLDEKGADNNPTVADNTAATVGDLRGLGWVISADKTTGEPNQEYNAQVRNANEVKFKSGNGINVSGKTLNGTRVITFELAKGEVVKSNEFTVKNADGSETNLVKVGDMYYSKEDIDPATSKPMTGKTEKYKVENGKVVSANGSKTEVTLTNKGSGYVTGNQVADAIAKSGFELGLADAAEAEKAFAESAKDKQLSKDKAETVNAHDKVRFANGLNTKVSAATVESTDANGDKVTTTFVKTDVELPLTQIYNTDANGNKIVKKADGKWYELNADGTASNKEVTLGNVDANGKKVVKVTENGADKWYYTNADGAADKTKGEVSNDKVSTDEKHVVRLDPNNQSNGKGVVIDNVANGEISATSTDAINGSQLYAVAKGVTNLAGQVNNLEGKVNKVGKRADAGTASALAASQLPQATMPGKSMVAIAGSSYQGQNGLAIGVSRISDNGKVIIRLSGTTNSQGKTGVAAGVGYQW

SEQ ID NO: 3597 - DNA, 1908 bp, Haemophilus influenzae
gtggtaaaaagcacagataaagcctacggctttttagagtgcgataaaaaaaactatttcatcgcaccgccatcaatgaaaaaagtgatgcacggcgacaaaatcaaagccaccattgaaaaacaaggcgacaaagaacaagccgagccagaagccttaattgagccaatgctcacacgttttatcgcaaaagtgcggttcaataaagacaacaaattacaagtgctggtggatcacccaagcattaatcagcccattggcgcgcaacaggcgaaatcggtaaaagaagcactgcaagagggcgactgggtcgtcgcacatttaaaaacccatccattgcgtgacgatcgctttttctacgccacaattaatcaatttatttgccgtgccgaggacgaacttgccccttggtgggtcacattggcacgccacgaacaatcgcgctatcccgtgcaaggcgcagaacattatgaaatgttagatcaaaaaacacgtgaaaatctgaccgcacttcattttgtaaccattgattccgaaagcacaatggatatggacgatgccttatatatcgaacccatcacacaaaacaacgaacaaacaggctggaaactcgtggtcgccattgccgatcccaccgcttacatcgccctagattgtcaaattgaacaagaagcaaaacagcgttgcttcacaaattatttgccgggctttaacattccaatgttaccccgtgaattatccgatgaattatgttccttaatcgccaatgaaacccgccctgcactggtttgttatatcgaaaccgatcttgcaggcaacatcacagccaaaccgcattttgtttccgcttatgtgcaatctaaagccaaactggtttacaacaacgtctcagactacttagaccaaacccaaaacgcgtggcagccagaaacgccagaaattgcacaacaaattcattggttacatcaatttaccaaagcacgcatacaatggcgtaaaacccattccttactctttaaagaaaaacctgattacgcctttgtgctggcagaaaacggcaaagtgcaagaaatcaaagcggaatatcgccgcattgctaatcaaattgtggaagaagcaatgattatcgccaacatctgcgccgcccaattcttagacgaaaacgcaaaaacaggcattttcaacacccacagcggttttgataaaaaatacttagaaaatgcacaccatttcttaatggcaaatttaaccaatgaacaaaatcaagcagaactggcagaacgttattcagtagaaaacttagcaacattaaacggctattgccaaatgcgtcacgacatcgaccatctagaaagtgattatgtagccctacgcctacgccgttatttaaccttctccgaatttaaatcagaattagcaccgcacttcgggctggggctagagggctatgccacttggacatccccaattcgtaaatattctgacatggttaatcatcgcttaatcaaagccgtgctggcaaaacagccttgcgaaaaaccacaaaatgaagttttggcacgtttgcaagaagcccgtcgccaaaatcgcctcgtcgaacgtgatattgccgattggctatattgccgctatctttcgccgaaagtggctgaaaatgtggaatttaatgcagaagtgcaagatgtaatgcgggcaggcttacgcgtgcaactgctcgaaaatggcgcatcgctattcattcctgctgccaccttgcacaacaacaaagaagaaatacaactaaatcctgatgaactcgctctttacataaaaggcgaccgcacttataaaatcggcgacatggtaaaagtgaaactcacagaagtgaaagaaaccacacgcagcattgtcggcgaaatcgttcaataa

SEQ ID NO: 3598 - protein, 635 aa, Haemophilus influenzae
MVKSTDKAYGFLECDKKNYFIAPPSMKKVMHGDKIKATIEKQGDKEQAEPEALIEPMLTRFIAKVRFNKDNKLQVLVDHPSINQPIGAQQAKSVKEALQEGDWVVAHLKTHPLRDDRFFYATINQFICRAEDELAPWWVTLARHEQSRYPVQGAEHYEMLDQKTRENLTALHFVTIDSESTMDMDDALYIEPITQNNEQTGWKLVVAIADPTAYIALDCQIEQEAKQRCFTNYLPGFNIPMLPRELSDELCSLIANETRPALVCYIETDLAGNITAKPHFVSAYVQSKAKLVYNNVSDYLDQTQNAWQPETPEIAQQIHWLHQFTKARIQWRKTHSLLFKEKPDYAFVLAENGKVQEIKAEYRRIANQIVEEAMIIANICAAQFLDENAKTGIFNTHSGFDKKYLENAHHFLMANLTNEQNQAELAERYSVENLATLNGYCQMRHDIDHLESDYVALRLRRYLTFSEFKSELAPHFGLGLEGYATWTSPIRKYSDMVNHRLIKAVLAKQPCEKPQNEVLARLQEARRQNRLVERDIADWLYCRYLSPKVAENVEFNAEVQDVMRAGLRVQLLENGASLFIPAATLHNNKEEIQLNPDELALYIKGDRTYKIGDMVKVKLTEVKETTRSIVGEIVQ

SEQ ID NO: 3599 - DNA, 789 bp, Haemophilus influenzae
atgggtttcttaacaggtaaacgcattttagtcacaggtcttgcaagcaatcgttccatcgcttacgggatcgcaaaatcaatgaaagaacaaggtgcagaacttgctttcacttatttaaacgataaattacaaccacgtgtagaagaatttgccaaagaatttggctctgacatcgtgcttcctttagatgttgcaactgatgaaagcattcaaacttgctttgcagaattaagcaaacgctgggaaaaatttgatggttttgttcacgcaatcgcatttgcaccgggcgatcaactagacggcgattacgtcaatgccgcaacccgtgagggctaccgcatcgcacacgacatcagtgcatacagcttcgtcgcaatggcacaagcggcacgcccttatttaaacccaaattcagcattattaaccctttcttacttaggtgcagaacgtgcaattcctaattacaacgtaatgtgcctcgcaaaagcctctcttgaagccgcaacacgcgtaatggcagcagatctaggcaaagagggcattcgcgtaaacgctatttcagcaggcccaatccgcactttagcggcatcaggcattaaaaacttcaaaaaaatgctttccacctttgagaaaaccgctgcattacgtcgcactgtgactatcgaagatgtgggtaactcagcggcatttttatgttctgacttagcctctggcattacaggcgaaatcgttcacgttgatgcaggtttcagcattacggcaatgggcgaattaggcgaagaataa

SEQ ID NO: 3600 - protein, 262 aa, Haemophilus influenzae
MGFLTGKRILVTGLASNRSIAYGIAKSMKEQGAELAFTYLNDKLQPRVEEFAKEFGSDIVLPLDVATDESIQTCFAELSKRWEKFDGFVHAIAFAPGDQLDGDYVNAATREGYRIAHDISAYSFVAMAQAARPYLNPNSALLTLSYLGAERAIPNYNVMCLAKASLEAATRVMAADLGKEGIRVNAISAGPIRTLAASGIKNFKKMLSTFEKTAALRRTVTIEDVGNSAAFLCSDLASGITGEIVHVDAGFSITAMGELGEE

SEQ ID NO: 3601 - DNA, 1581 bp, Haemophilus influenzae
atggcttatcctcaagaagtgaataaacgtcgcacttttgcgattatttcccaccctgatgcgggtaaaacaacgattactgaaaaagtacttttatacggcaatgcaattcaaaccgctggctcggtcaagggcaaaggctcggcggctcacgcaaaatctgactggatggaaatggaaaaacaacgtggaatttcgattaccacttctgtgatgcaatttccttataatgattgtttagtgaatttgctcgatacccccggacacgaagatttctctgaagatacttaccgcactttaaccgctgtggatagctgtttgatggttattgactctgccaaaggggtggaggaacgtacgattaagttgatggaagtcacacgtttacgtgatacgccaattatcacgtttatgaataaactcgaccgtgatattcgtgatccgatggaattgttggacgaggtggaaaatgtgttgaaaattcgttgtgcgccaattacttggccaattggctgtgggaaattgtttaagggtgtttatcatcttgcaaaagatgaaacctatctttatcaatctggtcaaggctcaactattcaagaagttcgtgttgttaaaggtttaaatagccctgaattagatgccgcggttggcgatgatttagcacaacagcttcgtgacgaattggaattggtgcaaggcgcaagtaatgaatttgagcaagatgcctttattaaaggggaacttacaccagtatttttcgggacggcattaggcaattttggagtggatcattttcttgatggcttaacgcaatgggctccgaagccgcaatctcgtcaagcggatacaagaacggtggaaagtgcggaagaaaaattcagtggttttgtgtttaaaattcaagccaatatggatccgaaacaccgtgacagagtggcgtttatgcgtgttgtttcgggcaaatacgaaaaagggatgaaacttaaacacgtccgtattggaaaagatgtggttatttctgatgcgctgacttttatggcgggcgatcgcgctcacgctgaagaagcttacgcaggcgatattattggtttgcataatcacggtaccattcaaattggcgatactttcacgcaaggcgaaatgctgaaatttacaggcattccaaactttgcgccagagttattccgtcgtattcgtttgaaagatcctcttaaacaaaaacaactgttaaaaggcttggtgcaactttctgaagaaggtgcagtgcaagtgtttcgtccattattaaacaacgatttaattgtgggtgctgtgggtgtgttgcagtttgatgtggtggtttctcgtctaaaaactgaatataacgtggaagcaatttatgaaaatgtgaacgtttccacggctcgttgggtagaatgcaccgatgggaaaaaatttgaagaatttaaacgtaaaaacgagcaaaatctagccttagatggcggcgataatttaacctatattgcgccaacaatggtaaatctaaatttagcccaagaacgttatcccgatgtagcgttttataaaacgcgggagcattaa

SEQ ID NO: 3602 - protein, 526 aa, Haemophilus influenzae
MAYPQEVNKRRTFAIISHPDAGKTTITEKVLLYGNAIQTAGSVKGKGSAAHAKSDWMEMEKQRGISITTSVMQFPYNDCLVNLLDTPGHEDFSEDTYRTLTAVDSCLMVIDSAKGVEERTIKLMEVTRLRDTPIITFMNKLDRDIRDPMELLDEVENVLKIRCAPITWPIGCGKLFKGVYHLAKDETYLYQSGQGSTIQEVRVVKGLNSPELDAAVGDDLAQQLRDELELVQGASNEFEQDAFIKGELTPVFFGTALGNFGVDHFLDGLTQWAPKPQSRQADTRTVESAEEKFSGFVFKIQANMDPKHRDRVAFMRVVSGKYEKGMKLKHVRIGKDVVISDALTFMAGDRAHAEEAYAGDIIGLHNHGTIQIGDTFTQGEMLKFTGIPNFAPELFRRIRLKDPLKQKQLLKGLVQLSEEGAVQVFRPLLNNDLIVGAVGVLQFDVVVSRLKTEYNVEAIYENVNVSTARWVECTDGKKFEEFKRKNEQNLALDGGDNLTYIAPTMVNLNLAQERYPDVAFYKTREH

SEQ ID NO: 3603 - DNA, 234 bp, Haemophilus influenzae
atggactttaattttattgagtttttaggttatatggcgactttttttgttgctgcatctttcttatttaaatctattgtgcatttacgcattgtaaatagtatcggcgcgattttatttgttatttacagcttaattatcacagcatatcccgttgcagtattaaatgcgtttttagttgtggtaaatatttatcaactttggcgattaaaacaagaaaacctctctaaataa

SEQ ID NO: 3604 - protein, 77 aa, Haemophilus influenzae
MDFNFIEFLGYMATFFVAASFLFKSIVHLRIVNSIGAILFVIYSLIITAYPVAVLNAFLVVVNIYQLWRLKQENLSK

SEQ ID NO: 3605 - DNA, 330 bp, Haemophilus influenzae
atgacattaacagaacaaatcattaccatcggaatttgtatagtggcggtacaatttacacgtttattaccattttttgtatttcctgttaatcgccccattccacaatatatccgttatcttggaaaagttttacctcctgcaatgtttggaatgcttgtcgtttattgctataaaaatattgagattttaactggctatcacggcattcctgatttgcttgcagggatagtcgtgcttggcttacatttctggaagaaaaatatgtttctatctattgccgtaggcacacttttctatatggctctcgttcaacttatttttatataa

SEQ ID NO: 3606 - protein, 109 aa, Haemophilus influenzae
MTLTEQIITIGICIVAVQFTRLLPFFVFPVNRPIPQYIRYLGKVLPPAMFGMLVVYCYKNIEILTGYHGIPDLLAGIVVLGLHFWKKNMFLSIAVGTLFYMALVQLIFI

SEQ ID NO: 3607 - DNA, 735 bp, Haemophilus influenzae
atgaatttatctcaacaaaatcaacactctaacccaattactgaagcggctaaggctgcttttccctacagcgtaccaatgattgcaggatttttatttcttggcatagcatacggtatttatatgaaagcacttggtttcggatttttatatcctactttgatggctttacttatttatgcgggttctgttgaatttattgcagcaggcgcacttattgcacctttttctccaatcagcgtattattaattaccttaatgattagtgcccgccaaattttttatggcatatcaatgctagaaaaatatggcatacatataggaaaaaaacgctggtatttaatcacaacacttgtagatgaatctttttccctaaattatatggcaaaaatcccaccgcacttagataaaggctggtatatgttttttgtgagcttatatttgcatatttattgggtacttggcgcagcaatggggaatttatttggtactgttttaccttttaatttaaaaggtgtggaattttcaatgacagcactattcttagttatttttgcagaaaattggttaaaagaaaaatcccacgaaagctctctattaggtttaggtatcgcattagtttttttacttattataggaaaagaatattttttaattccaacattaattggcatttggttaattctaactatgcgcataactaaattagaaacaaaattggaatctttaaaatga

SEQ ID NO: 3608 - protein, 244 aa, Haemophilus influenzae
MNLSQQNQHSNPITEAAKAAFPYSVPMIAGFLFLGIAYGIYMKALGFGFLYPTLMALLIYAGSVEFIAAGALIAPFSPISVLLITLMISARQIFYGISMLEKYGIHIGKKRWYLITTLVDESFSLNYMAKIPPHLDKGWYMFFVSLYLHIYWVLGAAMGNLFGTVLPFNLKGVEFSMTALFLVIFAENWLKEKSHESSLLGLGIALVFLLIIGKEYFLIPTLIGIWLILTMRITKLETKLESLK

SEQ ID NO: 3609 - DNA, 930 bp, Haemophilus influenzae
atgaaaccaacctttctagaatttagacatcttaaaactttattggctttaaaagagacaggcagcgtttctctagctgcaaagcgcgtatatctaacccaatcagcactttctcaccaaattaaattaatagaagaacaatttggcttgcctttatttgagcgtaaaagtaatccacttcgttttacttcagcgggagagcgtttaattcgtcttgcgaatgaagtaatacctaaagtgattgatgctgaacgtgatcttgcacgggtaaaacacggcgatgcaggacagttacgtatagcggtggaatgccatacttgttttgattggttaatgccagcgatggatgaattccgtcagcattgggggctagtagaactggatattgtatctggctttcatactgatcccgttggtttattactttcccatcgagcagattgggcgatagtatcagaaatagagcataatgatgatgtcatttttaaaccgctcttttcttatgaaatggttgggatttgctcaaaaaatcattctttagcagaaaaagatatttgggaagcggaagattttattgatgaaacttgggtaacttaccccgtacctgacgatatgttagatctatggcgtaaagtgcttaaatcaaaaggcattaatcctactcgccgtacaacagaacttactattgcaatgattcaacttgttgcgagtcgtcgtggtattgcgactatcccttattgggctgcgctgccttatttggaaaagggttatgttgtggcaagaaaagtcacaaaagaaggtttatatagcaatctatatgcggcgattcgcaaagaagatgaatccctttcttatttagaagatttttatcaaacagtcaaatctcaaagtttctcaactttacccggactttctgttttaaatttatag

SEQ ID NO: 3610 - protein, 309 aa, Haemophilus influenzae
MKPTFLEFRHLKTLLALKETGSVSLAAKRVYLTQSALSHQIKLIEEQFGLPLFERKSNPLRFTSAGERLIRLANEVIPKVIDAERDLARVKHGDAGQLRIAVECHTCFDWLMPAMDEFRQHWGLVELDIVSGFHTDPVGLLLSHRADWAIVSEIEHNDDVIFKPLFSYEMVGICSKNHSLAEKDIWEAEDFIDETWVTYPVPDDMLDLWRKVLKSKGINPTRRTTELTIAMIQLVASRRGIATIPYWAALPYLEKGYVVARKVTKEGLYSNLYAAIRKEDESLSYLEDFYQTVKSQSFSTLPGLSVLNL

SEQ ID NO: 3611 - DNA, 1077 bp, Haemophilus influenzae
  misc_feature 1059, 1060, 1061, 1062, 1063: n is any nucleotide
atgattatttcatcagctagcgattatcgtgaagcggcgcgtcgccgtgttcctccctttatgttccactatgccgatggcggttcttatgccgagcaaacacttgcgcgtaatgtgagtgatttggaaaatattgctttaagacaacgtgtcttaaaagatatgtctgaattggatactagtatagaattatttggtgaaaaactttcaatgccaactattcttgcaccagttggggcgtgcggaatgtatgcgcgtcgtggagaagtacaagcagcacaagcggcagataataaaggtgtgccgtttactctttcaacagtatcaatttgtccaattgaagaagtcgcccctgcgattaagcgtccaatgtggtttcagctttatgtgttaaaagatcgtggttttatgaaaaacgcgcttgagcgtgctaaggcggcaggctgttctactttagtgtttacggtcgatatgcctactccaggtgcgcgttatcgtgatatgcactcaggtatgagcgggccttacaaagaaattcgtcgtgtattgcaaggctttacgcacccattctgggcgtatgatgtgggtatcaaaggcaaaccgcacaccttgggtaatgtttcaacttatatgggtagacaaataggtttagatgactatattggctggctaacagaaaactttgatccatcaatttcgtggaaagatttagagtggatccgtgagttttgggaaggtccaatggtcattaaaggcattctcgacccagaagatgcgaaagatgcggtgcgtttcggtgctgatggaattgtcgtttcaaatcacggtggccgtcagttagatggcgtgctttcaagtgcaagagcgttgccaccgattgccgatgcagtgaaaggggatattaaaattattgccgattcaggtattcgcaatggtttagacatagtccgtatgttggcattaggggcagatgcaacaatgttaggtcgagcatttgtttatgctttaggggcagcaggtcgtcaaggtgtgaaaatatgctcgacatttcaaaaaagnnnnncattcattcattaa

SEQ ID NO: 3612 - protein, 358 aa, Haemophilus influenzae
  VARIANT 353, 354, 355: Xaa is any amino acid
MIISSASDYREAARRRVPPFMFHYADGGSYAEQTLARNVSDLENIALRQRVLKDMSELDTSIELFGEKLSMPTILAPVGACGMYARRGEVQAAQAADNKGVPFTLSTVSICPIEEVAPAIKRPMWFQLYVLKDRGFMKNALERAKAAGCSTLVFTVDMPTPGARYRDMHSGMSGPYKEIRRVLQGFTHPFWAYDVGIKGKPHTLGNVSTYMGRQIGLDDYIGWLTENFDPSISWKDLEWIREFWEGPMVIKGILDPEDAKDAVRFGADGIVVSNHGGRQLDGVLSSARALPPIADAVKGDIKIIADSGIRNGLDIVRMLALGADATMLGRAFVYALGAAGRQGVKICSTFQKXXXFIH

SEQ ID NO: 3613 - DNA, 810 bp, Haemophilus influenzae
atgaataaaaaagaaaaacgcccaactgtgctcttttttgattctggagtgggtgggtttagcgtataccgtgaagccaaaaaactattaccaaattggcattatctctattgttttgataatgccggtttcccttattcagaacgcgaagaagaaagtattattcaccgcactttagcggcgtgtcagcttattaatcaacgttatccattagatgcaatcgtgatagcttgcaatacagcgagtactgttgtgcttccgccgttgcgagctgcttttgatattcctatcattggaactgtacccgctattaaacctgcatcagaaataacaaaggcaaaacatattggtttattggcaacaaaagggactataaagcgtcattatgtcgatgagttgattgataaatttgcgcaagattgtattgttgagagactgggaacgacaaaattagtcgaaattgcggagcaaaaaattcgtggtcattccgttgatctaattaacttaaaagatgaattatctccgtgggcaggcatggcagatttggatacattagttttaggttgtactcactttcctctcatcaaagatgaaattcagttgtgcttgccacaagttaaatattttatggatccgagcgcagcaattgctaaacggatcaaatatttacttgatgataaaaatctacaagcgcaaaatgaaaaatataatcaaatgttttgcaccgcacattttcccgaagaatctcaatttaaaaaagctttacatctatggggatttgaatctttggaagtaatcaaaatagattaa

SEQ ID NO: 3614 - protein, 269 aa, Haemophilus influenzae
MNKKEKRPTVLFFDSGVGGFSVYREAKKLLPNWHYLYCFDNAGFPYSEREEESIIHRTLAACQLINQRYPLDAIVIACNTASTVVLPPLRAAFDIPIIGTVPAIKPASEITKAKHIGLLATKGTIKRHYVDELIDKFAQDCIVERLGTTKLVEIAEQKIRGHSVDLINLKDELSPWAGMADLDTLVLGCTHFPLIKDEIQLCLPQVKYFMDPSAAIAKRIKYLLDDKNLQAQNEKYNQMFCTAHFPEESQFKKALHLWGFESLEVIKID

SEQ ID NO: 3615 - DNA, 2082 bp, Haemophilus influenzae
atgagccttgaacttctcgatgccgtgcctttgaccagcctttctggtgtgggggctgccatttctaataaactggctaaaatcggcattcataacctgcaggatttactctttcatttacctattcgctatgaagatcgtacgcgaattacgccaatcgctaatcttcgccctgaacaatattttactatagagggaattgtacaaacctgtgaagtcgcttttggccgtcgcccgattttatcggtaagtttgtcagacggcacatcgaaaattatgttacgttttttcaattttaatgcgggaatgcgtaatagttttcaagcaggtgtgcgagtaaaggcttttggcgaagtgaaacgtggtcgccatatgccagaaattcatcatccagaatatcaaattgtgcgagataatgcgcccatagtattggaagaaaccctaacgccgatttattccacaacggaggggttaaaacaaaattcattacgaaaattaacggatcaggctttgacattactcgacaaggttcagattgcagaaattttgcctaatgaatttaatccacatcaatatagcttaaaagaggcattgcgattattgcatcgtccgccgccagatatttcattagaaatgttagagcaaggtaagcatcctgcacaacaacgattaatttttgaagagcttctggcacataatttagctatgcaaaaagtgcggttaggaacgcaacaattttctgccttaccgctacattatcaaacagatttgaaacagcgatttttagccaccttgccatttcaacccactaatgcgcaaaagcgagtagtgtccgatattgaacaagatcttatcaaagattatccgatgatgcgcttagtgcaaggggatgtgggctcgggaaaaacattggttgccgcattggctgctttaactgcaattgataatggcaaacaagtcgccttaatggcgccaacagaaattcttgcagaacagcatgcgaataattttagacggtggtttgagcctttcggtattgaagttggctggttggcaggtaaagtaaaaggaaaatcaagacaagcagagcttgaaaaaattaaaactggcacggtgcaaatggtggtggggacgcatgctttattccaagaagaagtcgagttttccgacttagcattagtgattattgatgaacaacatcgttttggggtgcatcaacgattaatgttgcgtgaaaaaggcgaaaaagcgggatttcatccccatcagttaattatgacggccacaccgattccgagaacgttggcaatgaccgtatatgcagatttggatacatcaattattgatgaattgcctccaggtcgtacgccgataacaaccgtagtggtttctgaagaacgtcgagctgaaattgtgatgcgtgtaaaaaacgcttgtgttaatgaaaaacgtcaagcctattgggtgtgtacgttaattgatgaatcagaggtgttagaagctcaagcagctgaagcgatttgggaagatttaacgaaagcgttaccgatgttaaatattggtttagtgcacgggcgcatgaaaccccaagaaaaacaagatgtcatgatgcgttttaaaaatgcagaattggatttattggtggcaacgacagtcatcgaagtgggtgttgatgttccgaatgctagtttgatgattatcgaaaatgcagaacgtttaggtttatcgcagcttcatcagttacgagggcgcgtcggtcgaggcagcacggcttctttttgtgtactaatgtataaacctccgctaggtaaagtttcacaaaaacgcttgcaggtgctacgagatagccaagatggatttgttatttcggaaaaagatttagaaattcgtgggccaggtgaagtacttggaacgaaacaaacgggaattgctgaattgcgagtagcaaatttaatgcgagatagaaaaatgataccaacggtgcaacattatgccaaattattgattcaaaaataccctgatgtggcagagagcttaatccgtcgctggctcaataataaagaaatttactcgaacgcttaa

SEQ ID NO: 3616 - protein, 693 aa, Haemophilus influenzae
MSLELLDAVPLTSLSGVGAAISNKLAKIGIHNLQDLLFHLPIRYEDRTRITPIANLRPEQYFTIEGIVQTCEVAFGRRPILSVSLSDGTSKIMLRFFNFNAGMRNSFQAGVRVKAFGEVKRGRHMPEIHHPEYQIVRDNAPIVLEETLTPIYSTTEGLKQNSLRKLTDQALTLLDKVQIAEILPNEFNPHQYSLKEALRLLHRPPPDISLEMLEQGKHPAQQRLIFEELLAHNLAMQKVRLGTQQFSALPLHYQTDLKQRFLATLPFQPTNAQKRVVSDIEQDLIKDYPMMRLVQGDVGSGKTLVAALAALTAIDNGKQVALMAPTEILAEQHANNFRRWFEPFGIEVGWLAGKVKGKSRQAELEKIKTGTVQMVVGTHALFQEEVEFSDLALVIIDEQHRFGVHQRLMLREKGEKAGFHPHQLIMTATPIPRTLAMTVYADLDTSIIDELPPGRTPITTVVVSEERRAEIVMRVKNACVNEKRQAYWVCTLIDESEVLEAQAAEAIWEDLTKALPMLNIGLVHGRMKPQEKQDVMMRFKNAELDLLVATTVIEVGVDVPNASLMIIENAERLGLSQLHQLRGRVGRGSTASFCVLMYKPPLGKVSQKRLQVLRDSQDGFVISEKDLEIRGPGEVLGTKQTGIAELRVANLMRDRKMIPTVQHYAKLLIQKYPDVAESLIRRWLNNKEIYSNA

SEQ ID NO: 3617 - DNA, 2115 bp, Haemophilus influenzae
ttggaactgtttgcggatttagatcgaattattcaagggtatttgcccgcagataaaattgaactcatcaagcgtgcgtttgtgattgcaagagatgcgcacgaaggacaatttcgctccagcggcgaaccttacattacccatcctgtggcggtagcctccattattgctcaacttcacttagatcacgaagcggtaatggctgcgcttttgcacgatgttattgaagatacaccttatacggaagaacaactgaaagaagagttcggtgctagtgtagctgaaattgtggacggtgtatcaaaactcgataagttgaaatttcgtactcgccaagaagcacaagtcgagaattttcgcaaaatgattttggcgatgacgcgcgatattcgtgttgtgttaatcaagcttgctgaccgcacgcataatatgcgcacgcttggttcgttacgaccagataaacgtcgccgtattgcgaaagaaacgcttgaaatctattgtccgcttgctcatcgtttaggtattgagcatatcaaaaatgaattagaagacttatcttttcaagcaatgcatccacatcgttatgaggtgttaaaaaaactcgttgatgtggcgcggagtaatcgacaagatttaatcgaacgtatttcacaagagattaaagtgcggttagaaaacgcaggcatttttgcccgagtgtggggacgtgaaaaacatctttacaagatctatcaaaaaatgcgcataaaggatcaagaattccactctattatggatatttatgcgttccgtgtgattgtgaaaaatgttggtgattgttatcgcgttttggggcaaatgcataatctttataagccacgtccaggccgagttaaggattatatcgcggtacctaaagcaaatggctatcaatctttgcaaacttcaatgattgggccgaaaggagttcccgtagaagttcatatccatactgaggatatggaacaagtcgctgaaatgggcattactgcgcattgggtttataaagaaaatggtaaaaacgatagtacaaccgcacaaatccgcgtacaacgctggttgcaaagtttggtcgaaattcaacaaagtgtaggtaattcgtttgagtttattgagaatgtaaaatcagagtttttcccgaaagaaatttatgtttttacgccaaaaggtcgaattgttgaattaccaatgggcgcaacagcagtagatttcgcttatgctgtgcattcagatgtggggaatacttgtgttggcgtgactgttgagcataaaccttatccactttcaaaagcccttgaatcagggcaaacagtcaatatcattactgatccaaatgcacatcctgaagtcgcatggttaaattttgtggtaacggctcgtgcgaaaacacggattcgccattatctcaaacagcgttgtgaagaggatgcggtgaaattaggcgaagttgagcttaatgtagcattacagccgcataatttaggtgatttttctattcaacaaattagcactgtattagatgctttagccctttcttctttagatgaattattacgagaaattggtttaggtaatcagtcagcctccatgattgcgcatcaatttgtgggcgtgccgttagaatctgctaatactaagaatctcgaatttgaatcaaaaatactcactattgcaccaatgcaagtgggtaaaacacaatttgctcaatgttgccatccaattctaggtgatcctattgtgggatgttgtacagaaaaaaatacagttgtggtacaccatcaacattgtgcaagtttgaaaaatgcttgtcgtcaatcgttggctaaatgggataacgttcaaagtgcggtgaattttgaggctgaattacaaatagaaatattgaatgagcagaatgccttgcttagtttaatgaccgcaatttcagcgagcgaaagcagtctccaaaatatttggacggaagaattagagaacaatttattgcttgtgattttgcaggtttgtgtaaaagatatcaaacaccttgccaatatcgttcatcgtattaaaggcatcactggcgtcgttaatgtcaaacgcaatattaatgagctatga

SEQ ID NO: 3618 - protein, 704 aa, Haemophilus influenzae
MELFADLDRIIQGYLPADKIELIKRAFVIARDAHEGQFRSSGEPYITHPVAVASIIAQLHLDHEAVMAALLHDVIEDTPYTEEQLKEEFGASVAEIVDGVSKLDKLKFRTRQEAQVENFRKMILAMTRDIRVVLIKLADRTHNMRTLGSLRPDKRRRIAKETLEIYCPLAHRLGIEHIKNELEDLSFQAMHPHRYEVLKKLVDVARSNRQDLIERISQEIKVRLENAGIFARVWGREKHLYKIYQKMRIKDQEFHSIMDIYAFRVIVKNVGDCYRVLGQMHNLYKPRPGRVKDYIAVPKANGYQSLQTSMIGPKGVPVEVHIHTEDMEQVAEMGITAHWVYKENGKNDSTTAQIRVQRWLQSLVEIQQSVGNSFEFIENVKSEFFPKEIYVFTPKGRIVELPMGATAVDFAYAVHSDVGNTCVGVTVEHKPYPLSKALESGQTVNIITDPNAHPEVAWLNFVVTARAKTRIRHYLKQRCEEDAVKLGEVELNVALQPHNLGDFSIQQISTVLDALALSSLDELLREIGLGNQSASMIAHQFVGVPLESANTKNLEFESKILTIAPMQVGKTQFAQCCHPILGDPIVGCCTEKNTVVVHHQHCASLKNACRQSLAKWDNVQSAVNFEAELQIEILNEQNALLSLMTAISASESSLQNIWTEELENNLLLVILQVCVKDIKHLANIVHRIKGITGVVNVKRNINEL

SEQ ID NO: 3619 - DNA, 267 bp, Haemophilus influenzae
atggctcgtgttactgtgcaagatgcggtagaaaaaattggtaaccgttttgatttaattttaacggctgcacgtcgtgcaagacaattacaacttaaccaaagtgtgccgttagtgccagaagataatgacaaaccaacagtaatcgcattgcgtgaaatcgaaaaaggtttgattaatcaagatattatggatgcacaagaattccaaaaaatggcgaaagtgcaagaaacagaagaagcagctgttgcattaattacagaataa

SEQ ID NO: 3620 - protein, 88 aa, Haemophilus influenzae
MARVTVQDAVEKIGNRFDLILTAARRARQLQLNQSVPLVPEDNDKPTVIALREIEKGLINQDIMDAQEFQKMAKVQETEEAAVALITE

SEQ ID NO: 3621 - DNA, 627 bp, Haemophilus influenzae
atgtctcaaggtaatctttatattttatctgcaccaagtggcgcaggaaaatcttcattaatttcagcgttattggcatcagatagctcaactcaaaaaatggtttctgtgtcacatacgacccgtgccccacgcccaggtgaagttgaaggcgtacactattattttgtatcaaaagaagagtttgaatcactcattgaacaagatttatttctagaatatgccaaagtttttggtggcaattattatggaacctctttacctgcgattgaggaaaatttagcaaaaggcattgatgtatttttagatattgattggcaaggcgcccaacaaatccgcaaaaaagttcctagtgttaaaagcatttttattttaccgccttcattgcctgaattagagcgtcgtttaattggtcgtgggcaagatagtgaagaggttatcgcggaacgaatgtcaaaagcgatgagtgaaatttcgcattatgacgaatatgattatgtcattgtgaatgatgattttgagaaaacattaaaagatttacaaagtattttgcaatcggaacgcttaactaaagattatcaacaaaaacaaaatgcaatgttaattcaacagctactagcaaaatag

SEQ ID NO: 3622 - protein, 208 aa, Haemophilus influenzae [sequence omitted]

SEQ ID NO: 3623 - DNA, 153 bp, Haemophilus influenzae
  misc_feature 130, 131, 132, 133, 134: n is any nucleotide
atggcaattaaaattggtatcaatggttttggtcgtatcggccgtatcgtattccgtgcagcacaacaccgtgatgacattgaagttgtaggtattaacgacttaatcgacgttgaatacatggcttatnnnnncattccattcattaattaa

SEQ ID NO: 3624 - protein, 50 aa, Haemophilus influenzae
  VARIANT 44, 45: Xaa is any amino acid
MAIKIGINGFGRIGRIVFRAAQHRDDIEVVGINDLIDVEYMAYXXIPFIN

SEQ ID NO: 3625 - DNA, 147 bp, Haemophilus influenzae
  misc_feature 8, 9, 10, 11, 12: n is any nucleotide
atgaatgnnnnncgatggcgtctaaaagcggataacggtaaaatcattgcagatagcggggaaggctataaaaactacactgattgtttacacgctattgacttagttaaatcaactaaccaatcaactaaggttgaaatggcttaa

SEQ ID NO: 3626 - protein, 48 aa, Haemophilus influenzae
  VARIANT 3, 4: Xaa is any amino acid
MNXXRWRLKADNGKIIADSGEGYKNYTDCLHAIDLVKSTNQSTKVEMA

SEQ ID NO: 3627 - DNA, 336 bp, Haemophilus influenzae
atggtgaatggtgattttgctaaatttgcccttcctttggcattgaaaatccaacaagataaacatattttaaaagcggtaaaacctcttgcattcgatcaggttgaaagtccgagcatgattgaacattgtgatagttgggtagcgaaaattaatcgcgcagagcaagaaggatttattaaaagagagaatattttatttgcgcttgatacaccaaacacagcgcataaagctaatattctggacacaattaagcgaacatttgatcacttcaagttacaacacattagctggaatgaagataaacaaattattaatttcgccaaagcaatctaa

SEQ ID NO: 3628 - protein, 111 aa, Haemophilus influenzae
MVNGDFAKFALPLALKIQQDKHILKAVKPLAFDQVESPSMIEHCDSWVAKINRAEQEGFIKRENILFALDTPNTAHKANILDTIKRTFDHFKLQHISWNEDKQIINFAKAI

SEQ ID NO: 3629 - DNA, 444 bp, Haemophilus influenzae
  misc_feature 9, 10, 11, 12, 13: n is any nucleotide
atggaatgnnnnntcaatgttggcttattgatgtgcgagcccgaaaagaaaaaactcacttatcaacttgtacctaaaaataacaaacgcgtgaatgatgttttctataaaagcaaaatgtttgaaactgtccgcgaaacgattaatgatgaattacaatatgtcgttaatcagccatttaacggaagtgcgcaggatatagcgactttttttcaccattacattgatgtaaaagaaggtattgttcaatatagcaatgctgcggtaggtatggtggatgatccgcaagattattttaacaagctatatacgcaatttatccaaaatactggagtaaaaacagaaagccaagaacaagtgattttgaaacattacaaaaccttgtttagacaagaaaaacgacagtgttcttgcacaatacaaacaatatatggtgaatggtga

SEQ ID NO: 3630 - protein, 147 aa, Haemophilus influenzae
  VARIANT 3, 4, 5: Xaa is any amino acid
MEXXXNVGLLMCEPEKKKLTYQLVPKNNKRVNDVFYKSKMFETVRETINDELQYVVNQPFNGSAQDIATFFHHYIDVKEGIVQYSNAAVGMVDDPQDYFNKLYTQFIQNTGVKTESQEQVILKHYKTLFRQEKRQCSCTIQTIYGEW

SEQ ID NO: 3631 - DNA, 699 bp, Haemophilus influenzae
atgtttaaaaaaacacttttattttttaccgcactttgtgcattttcagccaatgcaaatgtgattatcactggcaccagagtgatttatcctgcagggcagaaaaatgttatcgtgaagttagaaaacaatgatgattcggctgccttggtgcaagcgtggattgataatggcaatccaaatgccgatccaaaatacaccaaaaccccttttgtgattaccccgcctgttgctcgagtggaagcgaaatcagggcaaagtttgcggattacgttcacaggcagcgagcctttacctgacgatcgtgaaagcctcttttattttaatttgttagatataccgccgaaacctgatgcggaatttttggcaaaacacggcagttttatgcaaattgccattcgttcacgtttgaagttgttttatcgccctgcgaaactttcgcttgatccgttcgatgcgatgaaaaaagtggtgtttaaagccacgcctaaaggtgtgctggtagataatcaaacaccttattatatgaactatattggtttgttacatcaaaataaacctgcgaaaaatgtcaaaatggttgcgcctttttctcaagcggtatttgaagccaaaggcgtgcgttctggcgataaattgaaatgggtattggttaatgattacggtgccgaccaagagggcgatgccatcgcacaataa

SEQ ID NO: 3632 - protein, 232 aa, Haemophilus influenzae
MFKKTLLFFTALCAFSANANVIITGTRVIYPAGQKNVIVKLENNDDSAALVQAWIDNGNPNADPKYTKTPFVITPPVARVEAKSGQSLRITFTGSEPLPDDRESLFYFNLLDIPPKPDAEFLAKHGSFMQIAIRSRLKLFYRPAKLSLDPFDAMKKVVFKATPKGVLVDNQTPYYMNYIGLLHQNKPAKNVKMVAPFSQAVFEAKGVRSGDKLKWVLVNDYGADQEGDAIAQ

SEQ ID NO: 3633 - DNA, 1287 bp, Haemophilus influenzae
atgattatgcatagattagaaacagtccttttttcaaatggagaacgttttcctatattggttaatgttaaaactggtattcctgatttttattcaaccttatgggtaactgtagaactacgtaatcaatccgcagtaaacacaattagaaataagctgggaactatacagtgggtaatgaattgggaaaaacagaataatcttgttattagcgatctaattcataacaaagcactcttaacagaaaaccaattagaatctcttatccaacatatgagaataaatgtaaaaaagcgaaagaatgtaatcaatacaaaaaaaagtgtgttaatgaaaggtaggactcaatttattgatatttattctgccgtatctcttagtcatcaatataatagactaacaacgctttcagaatacatattatttctatctaaagtaattaatgtatctaatgaatatattgaaaaattgacgaaactaattacgttaattaaagagtcaagacctaaaaatcataaaacattatctatcaaaccagaaagtgaactacctgatggattgttagatgagtttatgtctattgcgaacttttctaatcctaataatccatttcaagatattggaattagaaaaagaaaccatttgatgtttatcttattaaaggaattagggattagaagaggagagctattatcaattcaaatcccatttattgatataggaacagctaaatcctcaattacaattagacgaacgcatgatgataaatttgacacaaggaagaagcaagctgtaagtaaaacgaaagaaaggcgacttcctatttcacaaaatatagctcaacttatcaatgactatattatgaactatcgctctaagattcctaacgctaataaacatccatatttatttgtaacccatcgaaaaggaaaaacgcaaggaaacccaattagtaccagttcttttgataatgttattgtaccaacgatgaaaaagatagattctaaattttctattattcatccacatatttttcgtcatgaatggaacttagatttttcacgaaaggtggataaaaataatcaaaatgtaaatcatgattcttctcataaagattttatttctcctgaaaaagaagcaaagatgagacaacatcttatggggcatacatccgagaaatcaggaaatatttataatcaacgttatataagagaaaaagctaacaagatattattagatcttcagattcagtttcaaaaaaaggttgataattatgaatcagaataa

SEQ ID NO: 3634 - protein, 428 aa, Haemophilus influenzae
MIMHRLETVLFSNGERFPILVNVKTGIPDFYSTLWVTVELRNQSAVNTIRNKLGTIQWVMNWEKQNNLVISDLIHNKALLTENQLESLIQHMRINVKKRKNVINTKKSVLMKGRTQFIDIYSAVSLSHQYNRLTTLSEYILFLSKVINVSNEYIEKLTKLITLIKESRPKNHKTLSIKPESELPDGLLDEFMSIANFSNPNNPFQDIGIRKRNHLMFILLKELGIRRGELLSIQIPFIDIGTAKSSITIRRTHDDKFDTRKKQAVSKTKERRLPISQNIAQLINDYIMNYRSKIPNANKHPYLFVTHRKGKTQGNPISTSSFDNVIVPTMKKIDSKFSIIHPHIFRHEWNLDFSRKVDKNNQNVNHDSSHKDFISPEKEAKMRQHLMGHTSEKSGNIYNQRYIREKANKILLDLQIQFQKKVDNYESE

SEQ ID NO: 3635 - DNA, 1521 bp, Haemophilus influenzae
atgaatcagaataaacgtcttagacagtcaagagatgggtatgtatttgatgaaaatgaaaactcttggcatataagtaaagacaaaaccattaacttttctcaacccatattaaatataaataaaaaaacattagatgggtttagaaaaacattagcaatatatgccgaaaaatactcaagttatcacgtatatcacatgtatcaacaatttcaacgattagtaatttcaactaatttagaagtcattaatgtgccaataatcttggattggaaaaataaactaggaaaagaacatgaatggtatttaggagcattaaagggttttttattgtcatggcatgagtatggctattatggagttgataaatctgttgtgtcattgctagaaagctttacgttgagtggaaatgataaaggtaaatcggtattaatgagatgcccttatacaggagcatttaccgaaaatgaaattttggctttaatggctgaacttgctagactttggagagaagatcttatttcatttgaaacatatgcatatattcacttacttcaatctacagctagaagacccattcaaatacgccatttaaaatttgaagatttaagaaaggaaatctctcaaggaacatggaattattttctaaatatccctagtgccaaaaaaagaggaggattattcagagaaacatttaaaaaacttgctatcacagaggacttatatttaattctcctaaactttatagaatatcaatataagaaattgcttagtttggttgatgaaacctttatttctagttataaaatgaaattaccaatgtttattgattggaattgtttaaagaagaatatcaaaaataggaattttgatctttcattattaaacaaagatatttttcattattctgcttcttcgttggagctatacgcattacgaaaattctgtattcaccaaaaagcaatttcagaacgaacaggcgagattattcatgtaacagcaagacgttttcgccatactagaggaacaaatctaggaagaaaaggggttggggcaacgattatagcagagctcctagatcatacagatacacaaaacgttaaagtttatactgaaaatacagctgatacagtgcaatacattgatcgtgttatgggtgctgaaatgggaaaactcgctcaagcatttacaggtagaattatttctaacttaaatgaaagcgaaagggggcatgatccaacatctttaataaccaataacggaatagatacaataggtgcttgtggtacaaatgatttttgtataactggctatgaaacttgttatttatgtcctaagtttagaccgctcgttgatggtcctcatcaacaaatcttaaataaattgtatgaggaaaaggaagaacgtttaaaacaaaccaaaagcatagattatgcatcatccaaagatcgtattattttagctgttgagtatgttgttcaagcttgcaatgatatgaaaagaactattgggagccactaa

SEQ ID NO: 3636 - protein, 506 aa, Haemophilus influenzae
MNQNKRLRQSRDGYVFDENENSWHISKDKTINFSQPILNINKKTLDGFRKTLAIYAEKYSSYHVYHMYQQFQRLVISTNLEVINVPIILDWKNKLGKEHEWYLGALKGFLLSWHEYGYYGVDKSVVSLLESFTLSGNDKGKSVLMRCPYTGAFTENEILALMAELARLWREDLISFETYAYIHLLQSTARRPIQIRHLKFEDLRKEISQGTWNYFLNIPSAKKRGGLFRETFKKLAITEDLYLILLNFIEYQYKKLLSLVDETFISSYKMKLPMFIDWNCLKKNIKNRNFDLSLLNKDIFHYSASSLELYALRKFCIHQKAISERTGEIIHVTARRFRHTRGTNLGRKGVGATIIAELLDHTDTQNVKVYTENTADTVQYIDRVMGAEMGKLAQAFTGRIISNLNESERGHDPTSLITNNGIDTIGACGTNDFCITGYETCYLCPKFRPLVDGPHQQILNKLYEEKEERLKQTKSIDYASSKDRIILAVEYVVQACNDMKRTIGSH

SEQ ID NO: 3637 - DNA, 2040 bp, Haemophilus influenzae
atgaataatctaatttttactccacaagataataatcctaaatctaatttagagcaatttattaatttcagtaaaaatcagcttactatctttggaaatgattgctgggaaaacaatcaatggaaaacaacattcagcatttatccagttcaggttcgtttttccacagaaagaattaaatctacagcttataaatatgagccattagctgcaccattcattgaatttgccaaagcctatattcgttatacttattctctaaatcccattcgtaatttagccagacatattgaatctttacgtatagttgaaatggctctctataatattaaaggaaaggctgacatacttcagcttgattatttagctattcatgaagtagaaaatatcgtatcaaaaaagtataaaaaaggtacggaatcagtcaataaattaggctatcaaattcaaaaattatttgatttttgtagagaaaatcaaattacacctcaactacctttatgggaaaatccttataaacgccctagagatttgactatactactggatgataaaggaaaagaataccgttcaagtaaaatgccaactgatgaagaaatgatgctggttgctaaactctttcatgatgcccctaatttagacaaagaaactgaatattatacagctgttatggctctacttatggtcgctccatctcgttgttctgagttgatgtctttatctgtcaattgcttagaatgggaggacgatagcttgggaaataagcaattaggtattcgatggataccagcaaaaaatggtaaagagggattaaagtgggttcctagctgtatgcaagatattgttgttgaagcggttaggcgtttaacaaatataagctccttggcaagaaaagcagctaaatttgcagaagaaaatcctaatatattgatgttatttgataaagatcttgtaacatcccattctttatacaaaaagcctttgactaaaagtgaaatagctgaagtgttagatattgattcccaaaatatctgtaacaccaaatggtttaaaaatttaataagtgaaaacgatggaattataacttatgagatactaggaaaatttttgtataaaaaatacacatcaaaatttaataattggccctatgtagataaacataaaaacgttaaggcttctgaagctttgttattattcagagaaaatgaatttcatgatgacttttcctctaaaagtttctcttttgtgttaccaacagtgaaccaaattaatgatagattttgctattcagaaactcgccctaaaacatcattatgggaaaaacattgtataggtacatctaaaggagaatttattagattaccatcgcataatgcaaggcattggttgagtacaaaagctgagcgaggtggaatggatgaattaactttagctaactgggcaggcagagctagagtggcagataataaagcttatgatcacaggacagaagaagaaaaaagtgaggcagttcgagatttactcattcctgaggatatttcaatattagacaaaattcatttaaatcttcctattacctatgaagacttaggtaaagacagaattggagttgcaacgataacagaaataggtatttgtgaacatgattatgcgatgtctccatgttctcgtcatggtgattgtgaaacatgtaaagagcttatttgtattaaaggattagagtcttctttagaaatattaaagcaacgtgagactcaattaaccgagcaatttaataaagccaaagaacaccataaaataggtgtttttggtgcagatcgttggataagtaacctaggatggagattaacacatataaaaactaaaattaagttcttagaaaatagtgaaatcccaaatggatcattattaagaatgcctgatgagtacgacccttctccagttaaattagctttacaggaaaagggaatggatatagatcttcaaaagcctgaaacagctagattagacgatgatttatatagactaatggagttatag

SEQ ID NO: 3638 - protein, 679 aa, Haemophilus influenzae
MNNLIFTPQDNNPKSNLEQFINFSKNQLTIFGNDCWENNQWKTTFSIYPVQVRFSTERIKSTAYKYEPLAAPFIEFAKAYIRYTYSLNPIRNLARHIESLRIVEMALYNIKGKADILQLDYLAIHEVENIVSKKYKKGTESVNKLGYQIQKLFDFCRENQITPQLPLWENPYKRPRDLTILLDDKGKEYRSSKMPTDEEMMLVAKLFHDAPNLDKETEYYTAVMALLMVAPSRCSELMSLSVNCLEWEDDSLGNKQLGIRWIPAKNGKEGLKWVPSCMQDIVVEAVRRLTNISSLARKAAKFAEENPNILMLFDKDLVTSHSLYKKPLTKSEIAEVLDIDSQNICNTKWFKNLISENDGIITYEILGKFLYKKYTSKFNNWPYVDKHKNVKASEALLLFRENEFHDDFSSKSFSFVLPTVNQINDRFCYSETRPKTSLWEKHCIGTSKGEFIRLPSHNARHWLSTKAERGGMDELTLANWAGRARVADNKAYDHRTEEEKSEAVRDLLIPEDISILDKIHLNLPITYEDLGKDRIGVATITEIGICEHDYAMSPCSRHGDCETCKELICIKGLESSLEILKQRETQLTEQFNKAKEHHKIGVFGADRWISNLGWRLTHIKTKIKFLENSEIPNGSLLRMPDEYDPSPVKLALQEKGMDIDLQKPETARLDDDLYRLMEL

SEQ ID NO: 3639 - DNA, 246 bp, Haemophilus influenzae
atgaccaccattgcaatggtagcgggaatgatcccggccgtgtttgccagcggtgcaggcgcggcatttagagcacctatggcaatcgctgtcatttgtggtttaatcgcctcaaccttgttgagcctagtatttgtgcctgtagtttattccttaatggatgacctcagagaatggctagccccgaaattagccaaattaacatcagtaacaccggaggatagaatcccaagaagagaaggataa

SEQ ID NO: 3640 - protein, 81 aa, Haemophilus influenzae
MTTIAMVAGMIPAVFASGAGAAFRAPMAIAVICGLIASTLLSLVFVPVVYSLMDDLREWLAPKLAKLTSVTPEDRIPRREG

SEQ ID NO: 3641 - DNA, 738 bp, Haemophilus influenzae
atggtggtcattaaaatcgggcggacacgttccgaatacggcacttatggcgaaatcgtaaatatgcccgttcacgctgtggtaaaacaccctgaaaacctcacaatggaacaagctgcggcaagttggatgatgtttgtaaccgcatacggcggtttgattgaatttggcaaggtgcaaaaaggcgattttgttgtattgggcggagcgaccagctcggtaggcattgccgccattcaaatcgccaaaatgcaaggggcaaacgtgattgctctgtctcgcacgcacgccaaaggtgatgtgcttttacagaaaggggcggattttgtgattgccaccaaagaagatgacgttacggctaaattactagaaattacaaacggcaaaggcgtgaatttggtgttcgaccctttgggtgacaaagaagcagcaaaaattatcaacgcaatgacacaagacggcaaatacatcatctacggtgcattaagccacgatgatatcgccgtgcctgtgttcccaattttaggcaaacacttaaccgtgcgaggctatgaattgtttgaaatcactaccgtaccagaaaaactcgctcaagcgaaaaaattcgtgtttgacggcttagcaagcggtcaattaaaaccagaaattgacaaagtttttgcttttgatgaaatggcggaagctcaccgttatatggaaagcaatgcacagattgggaagattttggtaaaggtttga

SEQ ID NO: 3642 - protein, 245 aa, Haemophilus influenzae
MVVIKIGRTRSEYGTYGEIVNMPVHAVVKHPENLTMEQAAASWMMFVTAYGGLIEFGKVQKGDFVVLGGATSSVGIAAIQIAKMQGANVIALSRTHAKGDVLLQKGADFVIATKEDDVTAKLLEITNGKGVNLVFDPLGDKEAAKIINAMTQDGKYIIYGALSHDDIAVPVFPILGKHLTVRGYELFEITTVPEKLAQAKKFVFDGLASGQLKPEIDKVFAFDEMAEAHRYMESNAQIGKILVKV

SEQ ID NO: 3643 - DNA, 342 bp, Haemophilus influenzae
atgggtttgattttgacggtggtgttgctgtttgcctttcaagcccaaaccattattgccaatcccttgattattttgctgattgccattcccttgctggcacagacttacggcatttttgccttggctcacgttttggcaaaatggctcaaattaccacacgaaatttccgcccctgcgtgcttgattggcacgagtaatttttttgaattggcggtggcggtggcaatttctttgttcggtttgcactcgggggcggcattggcaacggaggtcggtgtgctggtggaagtgcctgtgatgctctcgctagtgtggtggcttaatcggcaggtaaaataa

SEQ ID NO: 3644 - protein, 113 aa, Haemophilus influenzae
MGLILTVVLLFAFQAQTIIANPLIILLIAIPLLAQTYGIFALAHVLAKWLKLPHEISAPACLIGTSNFFELAVAVAISLFGLHSGAALATEVGVLVEVPVMLSLVWWLNRQVK

SEQ ID NO: 3645 - DNA, 399 bp, Haemophilus influenzae
atgtcaaaattttttaaaataaaacaagccagtgaacaaacaggcgtacatttggaaaccattcgttattatgaaaaacaaggcttaatcgcccctacacatcaacaaaacggctatcgtgtgtttgatgaaaatcagttagagcaattacgctttattaaaacttgccgtaatatcggtctttctttaagtaacatcaaaacgctgttgcaattacaacaaacgcctaacaaacaatgcaatgaaatcaatgcacttgccgagcaacatttggcatatttggacgaacaaatcaaagaactacaacaagttaaaacttttttaatgcaatttgtgggttgtgaaaataaaacggttgataagtgtcagattattcaaggtattaaagaaaaagaatag

SEQ ID NO: 3646 - protein, 132 aa, Haemophilus influenzae
MSKFFKIKQASEQTGVHLETIRYYEKQGLIAPTHQQNGYRVFDENQLEQLRFIKTCRNIGLSLSNIKTLLQLQQTPNKQCNEINALAEQHLAYLDEQIKELQQVKTFLMQFVGCENKTVDKCQIIQGIKEKE

SEQ ID NO: 3647 - DNA, 615 bp, Haemophilus influenzae
atggcgtgccaaaattgttgtggttcaaatcagcctattcatcaatcgcccaagtacaaaaaagccttgtggattgtcttgatattaaatttatcaatgttttttgtggaaattgtgatgggggttaaatcaggttcaacttcgctgttgtcggacagtttggatttcttgggcgacagtgccaattatttgataagtttgattgttttgccaatggcgttaagttaccgagccaaagcatctatggttaaggggctaacgatgggcggttttggtttatttattttaatgacaaccatttatcgtgtgttttatggggaaatgcccagttattctgaaataagcattgtgggatttttggcgttattggtcaatgtgtcggcattgttgatattattaaaatttcgtgatggcgacagcaatgtccgcagtgtgtgggtgtgttcccgaaacgatgcgattggtaatgtggcggtaattttggcgggtatggcagtttatttttttcaatcaaaatatcctgatttaattgtggcgtttgttttggcatttttggcattacaagccagtcaagaaatcatcaaaagggcttgggcggaattaaaagtcagttaa

SEQ ID NO: 3648 - protein, 204 aa, Haemophilus influenzae
MACQNCCGSNQPIHQSPKYKKALWIVLILNLSMFFVEIVMGVKSGSTSLLSDSLDFLGDSANYLISLIVLPMALSYRAKASMVKGLTMGGFGLFILMTTIYRVFYGEMPSYSEISIVGFLALLVNVSALLILLKFRDGDSNVRSVWVCSRNDAIGNVAVILAGMAVYFFQSKYPDLIVAFVLAFLALQASQEIIKRAWAELKVS

SEQ ID NO: 3649 - DNA, 1017 bp, Haemophilus influenzae
atgggtttgtttgaacgttttttaagcctttgggtggcgttggcgattgtgctgggcgtggttttgggtgtttggtttcccaatgtatttcaatgggttgcatctttggaagtggctcatgtgaatttgcctgtggcgatactgatttggctgatgatttatccgatgatgattcagattgattggtcggcaatcaaagacgtgggcaaaaaaccaaagggcttatttttaaccttatttatcaactggttggtcaagccgtttacgatggcgatgttcggctggttattttttcgggtgttttttgcaggttgggtggacgcacagtcggcacaagaatacattgccggcatgattttgctgggcgtggcaccgtgtacggcaatggtgtttgtgtggtcgcaactggtcaaaggcgaccccaattacactttggtgcaggtttcggtcaatgatttgattatgattgtggcgtatgctccgattgcaggcgtattgctcggcgtaagcgacatagagattccgtggaataccttgattttaagcacggttttatatgtgctgttgcccttgctggcaggctggcttacccgctcttatttacaaaaatcgggtaaatcggtggcacaattttcaggcagtctaaaacccttttccgtgatgggcttgattttgacggtggtgttactgttcgcctttcaagcccaaaccattattgccaatcctttgattattctgctgattgccattcccttgctggcacagacttacggcatttttgccttggctcacgttttggcaaaatggctcaaattaccacacgaaatttccgcccctgcgtgcttgattggcacgagtaatttttttgaattggcggtggcggtggcaatttctttgttcggtttgcactcgggggcggcattggcaacggtggtcggtgtgctggtggaagtgcctgtgatgttgtcgctggtgtggtggataaaccgaaaatcgctggggaataaaggggtgtag

SEQ ID NO: 3650 - protein, 338 aa, Haemophilus influenzae
MGLFERFLSLWVALAIVLGVVLGVWFPNVFQWVASLEVAHVNLPVAILIWLMIYPMMIQIDWSAIKDVGKKPKGLFLTLFINWLVKPFTMAMFGWLFFRVFFAGWVDAQSAQEYIAGMILLGVAPCTAMVFVWSQLVKGDPNYTLVQVSVNDLIMIVAYAPIAGVLLGVSDIEIPWNTLILSTVLYVLLPLLAGWLTRSYLQKSGKSVAQFSGSLKPFSVMGLILTVVLLFAFQAQTIIANPLIILLIAIPLLAQTYGIFALAHVLAKWLKLPHEISAPACLIGTSNFFELAVAVAISLFGLHSGAALATVVGVLVEVPVMLSLVWWINRKSLGNKGV

SEQ ID NO: 3651 - DNA, 405 bp, Haemophilus influenzae
atgaacatcaccatttatcacaacccaaactgcggtacttcacgcaatgtactagcactcatccgccacgctggtattgagccacaagtgattgaatatttgaaaaatccgccaagtgaaacgactttgcgtgatttaatcaaacgcatgggcatcacgcctcgccaattgctgcgaaccaatgtgcctccgtatgaaacgtttgatttgcaaaatgaaaaattaagcgatgacgagctcatttccgccatgcttcgtgaaccgattttaatcaatcgtccgattgtggtgagtgaaaaaggtgtgaaattatgccgtccgtccgaaacagttttggcatttttaccgccttttgcgaccccgtttgtcaaagaagacggcgaaattattaatcataaggagtaa

SEQ ID NO: 3652 - protein, 134 aa, Haemophilus influenzae
MNITIYHNPNCGTSRNVLALIRHAGIEPQVIEYLKNPPSETTLRDLIKRMGITPRQLLRTNVPPYETFDLQNEKLSDDELISAMLREPILINRPIVVSEKGVKLCRPSETVLAFLPPFATPFVKEDGEIINHKE

SEQ ID NO: 3653 - DNA, 396 bp, Haemophilus influenzae
gtgggttttcgtatttggaaaggtggcttcgggcaattaaaaaatacttcaatcatacttgaaatattgaaatttcttgttataattacgcctatgaatacgatacaagcaagcaaactctttgagagcctgtcttctccgataagactggcgatttttcaacaacttaccgccgcaggcagtactggcatgattgctggcgacttggcaaaacagcttaaccttgccccgaataatgtgtcttttcatctaaaaagcctgttgcattcggggcttgtgcgtgtggtgcaggaaggacggcacatgcgttattttgccgagctggatttgatgatggcattgacccattttctgacccaaaactgctgttctcaaacaggcgaatcttgccagtga

SEQ ID NO: 3654 - protein, 131 aa, Haemophilus influenzae
MGFRIWKGGFGQLKNTSIILEILKFLVIITPMNTIQASKLFESLSSPIRLAIFQQLTAAGSTGMIAGDLAKQLNLAPNNVSFHLKSLLHSGLVRVVQEGRHMRYFAELDLMMALTHFLTQNCCSQTGESCQ

SEQ ID NO: 3655 - DNA, 429 bp, Haemophilus influenzae
ttgttgcttttaagtttaggcataaccgcttttgctcaagcacaaacactttctatggaagtgtggaaaagcccgacttgtggctgttgtaatgaatggatcagctatatgcagaaaaacggttttgaggttaaagtcaacgaaacaggcaattatgatgctcataagcgctttaacattaaatatgaacatgcttcttgccacacagccgtgattgatggctatgtgattgaaggacatgtacctgctgaggatatcaaacgtttactcgcagaaaaacccgatgcaataggcttgtctgcaccgggaatgccaattggttcaccaggtatggacggtgaagcatacggcggacgcaaagatccttatgatgttgttttgattaagaaaaacggtgaaagtgaagtgtttaaatcctataaccaatag

SEQ ID NO: 3656 - protein, 142 aa, Haemophilus influenzae
MLLLSLGITAFAQAQTLSMEVWKSPTCGCCNEWISYMQKNGFEVKVNETGNYDAHKRFNIKYEHASCHTAVIDGYVIEGHVPAEDIKRLLAEKPDAIGLSAPGMPIGSPGMDGEAYGGRKDPYDVVLIKKNGESEVFKSYNQ

SEQ ID NO: 3657 - DNA, 213 bp, Haemophilus influenzae
atgaataaattaacagcaggtcgcccaagcgcaactaaaagcaaactttctgttgctgatgtcagcgagcaagagcgtattaagcggattagctttgatatgacagaagccaatcatcgtgaactaaaaaaatatgcggcggaacagggcgtaaccattcgggaagtgctgaatggtttaattgatgagttattggcgaaaaagaaaaaataa

SEQ ID NO: 3658 - protein, 70 aa, Haemophilus influenzae
MNKLTAGRPSATKSKLSVADVSEQERIKRISFDMTEANHRELKKYAAEQGVTIREVLNGLIDELLAKKKK

SEQ ID NO: 3659 - DNA, 285 bp, Haemophilus influenzae
atggcatttgtttggggcaaacgtgatttgcaaaccgctttggctttaaagcagcgtttaaaagcactcaaagtaagctatgaacgtattgccggcgataattgggatgcttttgtaaatgcgttttctgataccggtgaccaatggatgggtaagcaacatactaaagcgattgagggtaataactgtcggattcggcacagattaagtagagccgtcagacgcagttgctgtttttccaaatcaatgttttatcatgttaaatcttttaatattggattttag

SEQ ID NO: 3660 - protein, 94 aa, Haemophilus influenzae
MAFVWGKRDLQTALALKQRLKALKVSYERIAGDNWDAFVNAFSDTGDQWMGKQHTKAIEGNNCRIRHRLSRAVRRSCCFSKSMFYHVKSFNIGF

SEQ ID NO: 3661 - DNA, 294 bp, Haemophilus influenzae
atgataaccgatgtagatacggtatttttggtctatccgatttggtggtacaaaatgccaatggcgctttattctttgctcgagcaagtagactttagtgggaaaaatattgtgccggtggttggtcacggtggcagtcgtttgggtggaacggataaagatattcagcaacttcaaccacaagccaacgtgaaaaacggttttgaggcgtatttgcataaaacggtaagggctgaacaacaagtggaaaaaagattagctaaattcttaaccgaaaatggttatacaaaataa

SEQ ID NO: 3662 - protein, 97 aa, Haemophilus influenzae
MITDVDTVFLVYPIWWYKMPMALYSLLEQVDFSGKNIVPVVGHGGSRLGGTDKDIQQLQPQANVKNGFEAYLHKTVRAEQQVEKRLAKFLTENGYTK

SEQ ID NO: 3663 - DNA, 393 bp, Haemophilus influenzae
atggttatacaaaataaaaatgtaggggcacacagcgtatgtccctaccatttaaatttcaattttatgaagaaaaaatatctcctccaactcgctcaagatttggttctaacggcaatattgctttctctttttggctatcatctttatgaagaaatcacgcacgaatggctcggcttggtcttttttgctttgattatctcacatctttcactgaatacatggtggctcaaaaagaccttttcaggcagttataacagctatcgcattttgcaaagtgcggtcaattttgcaacttttttgttatttttaaccgcttgtatcagtggcattatgctttctaaacatctattggtggaaatgctattccactctaccacagatttaatgtga

SEQ ID NO: 3664 - protein, 130 aa, Haemophilus influenzae
MVIQNKNVGAHSVCPYHLNFNFMKKKYLLQLAQDLVLTAILLSLFGYHLYEEITHEWLGLVFFALIISHLSLNTWWLKKTFSGSYNSYRILQSAVNFATFLLFLTACISGIMLSKHLLVEMLFHSTTDLM

SEQ ID NO: 3665 - DNA, 1134 bp, Haemophilus influenzae
atgattgcttctgctaccacaccagaacagatccttttttctaaagcaagagacaatacggtcattgatccatcatattccaataatgtccagcaatggtcggtatttaataattggatagataccactgtttcaggcgatacgggttatagttttgcaggatttagttgtgtatctaacccttgcgcgcaaatgcaactgcccttacgattttatcttgatagtgcaatattagaagctacgtcgatgcggagtgctgataatcaagttatttttaaaatacgtcaacatccagagcttggtgtttcttttcaattaggaatgaaaaaaggtattgaagatgttaaatggttaagtaatttacaacaagaggattttttactaaccactttacaaatttattttggtgatgcagcggatatatcatttaaagtaagagcaaaattacacttacttaaattacctactgaaaatacagagcttcctacaatgaaacttaatcttggtcaaattaaattgcaatcttggggaataaataattggggacgtacaaaagtatcatatcgagttcaagatgttggttcacttaatgtgcaacttaagacaccaaaaatttacttcatccaacaacaacgccaatgtatcttgaatagtacttacaaaaaaataccagtcactctaaaaagtgttaaaaaacgtgaatttgagacaaacactgaaattgaaggtggacaatttaagctaagagtgaactgtgaggatacaacatataacaaatttaacggcaaatggttatttcctgtagtgaaagttacttttaggggcgaagatggtacaatgaatgatggaacaaatgaattacttcgcacccaaacaggcaccggacaagccacaggcgttagcttaaaaatcaaacgtgatagcggtaatggcgattcggttaaatatggacttgattcagccaatatgaataatcatggacaatttgaattaaaaaaacaaccatcccctgctggcggagatcaaagtgctgaagaaaccttcaaagtctattacgtaaaagacacaacaagaggtgctttaaccgaaggaaaagttaaagccgccgccactttcacaatgtcatatcaataa

SEQ ID NO: 3666 - protein, 377 aa, Haemophilus influenzae
MIASATTPEQILFSKARDNTVIDPSYSNNVQQWSVFNNWIDTTVSGDTGYSFAGFSCVSNPCAQMQLPLRFYLDSAILEATSMRSADNQVIFKIRQHPELGVSFQLGMKKGIEDVKWLSNLQQEDFLLTTLQIYFGDAADISFKVRAKLHLLKLPTENTELPTMKLNLGQIKLQSWGINNWGRTKVSYRVQDVGSLNVQLKTPKIYFIQQQRQCILNSTYKKIPVTLKSVKKREFETNTEIEGGQFKLRVNCEDTTYNKFNGKWLFPVVKVTFRGEDGTMNDGTNELLRTQTGTGQATGVSLKIKRDSGNGDSVKYGLDSANMNNHGQFELKKQPSPAGGDQSAEETFKVYYVKDTTRGALTEGKVKAAATFTMSYQ

SEQ ID NO: 3667 - DNA, 651 bp, Haemophilus influenzae
atgcaaaaaacacccaaaaaattaaccgcactttgccatcaacaatccaccgcttcttgtagtggctcgaattatagtggctcaaattatagtggctcaaaatgctttaggcttcatcgtctggctttgcttgcttgcattgtggcactgcctgcttatgccgttgatggcagagtgacctttcaaggggagattgtaagtgatggcacttgtaaaattgaaacagacagcaaaaatcgcactgttaccctgccaacggtgggcaaagccaatttaagccttgcagggcaaaccgccgcccccgtgcctttttctatcacgctaaaagagtgtaatgcagccgatgctaaaaaagccaatctgctatttagtggggcagtaacaaaaggtcagctttatctttctaatgccgcaagcagcggcaaagccaacaatgttggcattcaaattgtcaaagctgatggcacaggctcgcccattaacgtagacggcagccaagccaacagcgaaaaagcccccgacacaggcaaagagcaaaacagcacagttattcaaccccgttttgactacttcgcacattattacgccacaggtgccgccaccgcaggcgaagttgaagccactgcaacttttcaagtgcagtataactaa

SEQ ID NO: 3668 - protein, 216 aa, Haemophilus influenzae
MQKTPKKLTALCHQQSTASCSGSNYSGSNYSGSKCFRLHRLALLACIVALPAYAVDGRVTFQGEIVSDGTCKIETDSKNRTVTLPTVGKANLSLAGQTAAPVPFSITLKECNAADAKKANLLFSGAVTKGQLYLSNAASSGKANNVGIQIVKADGTGSPINVDGSQANSEKAPDTGKEQNSTVIQPRFDYFAHYYATGAATAGEVEATATFQVQYN

SEQ ID NO: 3669 - DNA, 2397 bp, Haemophilus influenzae
gtgttgggcattgattttgctcgatttaatgtaaaaaatgccgtgttaccagggcgttatgaagcgcaaatctatgtaaataatgaagaaaaaggcgaaagcgacattatttttgctgataatcctgccacaggtcgggctgaattatgctttacgcctaaacttcaagaaatgctggatttgatggatgaagccattgtgaaatcgcccaatgcagaagatgacacttgtgtttttgcttctgaggctattcctaaaggcacctttgattatcaaggtggcgacatgaaattgaaacttgagcttcctcaagcattaaccattcgccgcccaagaggctatattgcaccgtctcgctggcaaactggcaccaatgccgcttctgcaaattacgatatcaactattatcgttctggtaatcctgaagtgaaatctaaaagtttgtatgtgggcttgcggggtggtgtgaatttaggcaattgggctttgcggcataatggcagttttagccgttttgaaaaccacagtagttcaggttttacggataaaggcaaaaatcattacgaacgtggcgatacttatttacaacgagatttcgccctgcttcgtggtaatgtcactgttggggattttttcagcactgcccgcattggggaaagttttggtctgcgtggtttgcgtattgcttctgatgatagaatgcttgccccatcacaacgtggttttgcccccgtggtgcgtggcgtggcaaacacaaacgccaaagtcagcattaaacaaaatggctatacgatttatcaaatcactgtgcctgcagggcctttcgtgattaacgatttgtatgccagtggttacagtggcgatttaacggtggaaatccaagaaagcgatggcaaagtgcggtcatttattgtgccgttttctaaccttgccccgttaatgcgtgtggggcatttgcgttatcaattagctggtggacgttatcgcattgacagccgaacctttgatgaacgggtgttacaaggcgtgttgcaatatggtttaactaatcatctcacgctgaattcaagtctgctttacactcgccattatcgtgcagggctatttggttttggattaaacacgccgattggggcgttttctgccgatgccacttggtcgcatgctgaatttccgctgaaaaaagtcagcaaaaacggctacagcttgcacggcagttatagcattaacttcaacgaaattggcaccaatctcacgttggcagcctatcgatattcttcccgtgatttttacaccttaagcgatactattggtcttaaccgcacctttaaacaatttagcggggcgtatttacccgaaatttaccgcccaaaaaatcagttccaagtgagtttaagtcaaagtctggggaattggggcaatctttatctttcagggcaaacctataattattgggaaaaacgtggcacgaatacgcaatatcaactggcttatgcaaatcgtttccatattctcaattactctataaacctctcacagagtattgataaagaaacaggcaaacgtgacaacagcatttatttaagcctcagcctgccattaggcgataaccattctgcagacagtagttattctcgcagcggtaacgacattaaccaacgacttggcgtaaatggctcttttggcgaacgtcatcaatggagttatggcattaacgcttcacgcaataatcaaggctaccgcagttatgacgcaaaccttgcacataacaatagcattggtagctatcgtgcttcttattcccgtgacagcctcaaaaatcgctctacttcattaggcgcaagtggtgctgtcgtggcacacaaatacggtattaccttaagccaacctgttggcgaaagctttgccattattcacgctaaagatgctgcaggggcaaaagtggaatcaggtgccaatgtcagccttgattatttcggcaatgcggttgtgccttacaccagcccatatgaaatcaattatattggtatcaatccatctgatgcagaggcgaatgtggaatttgaagccactgaacgccaaattattcctcgtgcaaattcaattagcttagtggatttccgcacgggcaaaaatacaatggtgttatttaacctcactttgccaaatggcgagccagtgccaatggcatccaccgcacaagatagcgaaggggcatttgtgggcgatgtggtgcaagggggcgtgcttttcgctaataaacttacccagccaaaaggcgagttaatcgtcaaatggggcgagcgagaaagcgaacaatgccgcttccactatcaagttgatttggataatgcacaaatacaaaaccacgatattcaatgcaaaaccgcagaataa

SEQ ID NO: 3670 - protein, 798 aa, Haemophilus influenzae
MLGIDFARFNVKNAVLPGRYEAQIYVNNEEKGESDIIFADNPATGRAELCFTPKLQEMLDLMDEAIVKSPNAEDDTCVFASEAIPKGTFDYQGGDMKLKLELPQALTIRRPRGYIAPSRWQTGTNAASANYDINYYRSGNPEVKSKSLYVGLRGGVNLGNWALRHNGSFSRFENHSSSGFTDKGKNHYERGDTYLQRDFALLRGNVTVGDFFSTARIGESFGLRGLRIASDDRMLAPSQRGFAPVVRGVANTNAKVSIKQNGYTIYQITVPAGPFVINDLYASGYSGDLTVEIQESDGKVRSFIVPFSNLAPLMRVGHLRYQLAGGRYRIDSRTFDERVLQGVLQYGLTNHLTLNSSLLYTRHYRAGLFGFGLNTPIGAFSADATWSHAEFPLKKVSKNGYSLHGSYSINFNEIGTNLTLAAYRYSSRDFYTLSDTIGLNRTFKQFSGAYLPEIYRPKNQFQVSLSQSLGNWGNLYLSGQTYNYWEKRGTNTQYQLAYANRFHILNYSINLSQSIDKETGKRDNSIYLSLSLPLGDNHSADSSYSRSGNDINQRLGVNGSFGERHQWSYGINASRNNQGYRSYDANLAHNNSIGSYRASYSRDSLKNRSTSLGASGAVVAHKYGITLSQPVGESFAIIHAKDAAGAKVESGANVSLDYFGNAVVPYTSPYEINYIGINPSDAEANVEFEATERQIIPRANSISLVDFRTGKNTMVLFNLTLPNGEPVPMASTAQDSEGAFVGDVVQGGVLFANKLTQPKGELIVKWGERESEQCRFHYQVDLDNAQIQNHDIQCKTAE

SEQ ID NO: 3671 - DNA, 195 bp, Haemophilus influenzae
  misc_feature 12, 13, 14, 15, 16: n is any nucleotide
atgaatgaatgnnnnnaggcaccaaatgggcatgcgatgtttacgcaaataacccgagaagaagccaaagaaaaaataaaggcaatgtcccaagctatttatgacggcgaattaaaatttgagattcacatcccagaaaatccgctttcaaaactagcaagattagttgcaaggataatcaaaaagtttacttaa

SEQ ID NO: 3672 - protein, 64 aa, Haemophilus influenzae
  VARIANT 4, 5, 6: Xaa is any amino acid
MNEXXXAPNGHAMFTQITREEAKEKIKAMSQAIYDGELKFEIHIPENPLSKLARLVARIIKKFT

SEQ ID NO: 3673 - DNA, 180 bp, Haemophilus influenzae
ttgaataaattgattggtgacgtgcgcgaaacgcaagaaactgaacgagtgaatttacaacagcaaattatcgaaagattaccgcacttaaacctcgaacaaatgcgtgaaattcgtcagcgtgttgagcagttttacccaacgttctttcacgttttgtcagaagcaattaaaaaataa

SEQ ID NO: 3674 - protein, 59 aa, Haemophilus influenzae
MNKLIGDVRETQETERVNLQQQIIERLPHLNLEQMREIRQRVEQFYPTFFHVLSEAIKK

SEQ ID NO: 3675 - DNA, 630 bp, Haemophilus influenzae
atgtcaaatcttactatcttcaaatttgaaaacgctcctgttcaaaccattgtagaaaacaatgagatcttttttagagcagctcagcttgcagagttattgcaatataaaaatccacataaagcgattaaagatcacgtagatcctgacgacctaacgaaacgtgaggtcgtcaataccatcaataaacgtgctcaagttctcttcgtgaatgaaagcggaatgtattcattagtcttgagttcaaaattagagcaggctaaaaaagtaaaacgctgggtcacttctgaagtgttaccggcaattagaaaaacaggaaaatatcaacttcaaccacaacagctcgccttgccagaacctgaaaaattcacgcacgagctcaccgaatttgaaatagaaacgctcgtttggctccttagaggacatcaccaaatgaacaccctactcgggcaacttgaaaagccacttgacgccatcggcagcaatctacaccccgctgtgtacagctactggaaagaatatggccgccaatacaaagatgcactcccaaccattaaacgcttaatggcacccttcaaacaatcaaaccgtttgaattgggcacgtgcacaacaccttataaaccaataa

SEQ ID NO: 3676 - protein, 209 aa, Haemophilus influenzae
MSNLTIFKFENAPVQTIVENNEIFFRAAQLAELLQYKNPHKAIKDHVDPDDLTKREVVNTINKRAQVLFVNESGMYSLVLSSKLEQAKKVKRWVTSEVLPAIRKTGKYQLQPQQLALPEPEKFTHELTEFEIETLVWLLRGHHQMNTLLGQLEKPLDAIGSNLHPAVYSYWKEYGRQYKDALPTIKRLMAPFKQSNRLNWARAQHLINQ

SEQ ID NO: 3677 - DNA, 345 bp, Haemophilus influenzae
atgaaacattcaaaaaccccattacgccaagaaaaacaaagcttcacacattttatgaaaggcagtgaaaaatggctaactcgaatcagctattttctcgccgccttggttatcgccctaattgtgggcgggattagcctacacgccaatgccaaccccaccgactggcacgacaacgccctcagcgaacaaatccaacaagaagaacgcgcgagagcaaaagcccaatggcgtgaagaaaattgcatctatcaagcaaatcttaccccacaagttaatgccgatatgtatcgttatgtcgagcaaaaacaagcagaaattaaccgcactttaggagaaaaataa

SEQ ID NO: 3678 - protein, 114 aa, Haemophilus influenzae
MKHSKTPLRQEKQSFTHFMKGSEKWLTRISYFLAALVIALIVGGISLHANANPTDWHDNALSEQIQQEERARAKAQWREENCIYQANLTPQVNADMYRYVEQKQAEINRTLGEK

SEQ ID NO: 3679 - DNA, 495 bp, Haemophilus influenzae
atgaaaatcgaaagctacaaaacacaaatcgtccgcaccaaaaacggaagttattttggcgaattatgggtgaacaataagctgtaccaaaaaacttcctattttgccaatgaagccattgcaaccttacgcctaaataaacgaatcgaaaattttaatgcaatggaaaacaccaatattccgccttatcaaaaagatgcggaaactaatcaatttactgccacaccgaagaaaagtgcggtcgaaaaagaagtggtttcaacaaaaccacaagcccctaaaacagaagcgaaacctaaaccgactaccccacgtcgcaaacccttcacgccctacggattaaacggctattttgtggataaacaaggcaatatccgcctacatttagaccgaaaagcacacgcacataccattgtgctaaaccctgaaatgttctcaatgcttgccaatatggtacaagccacacaggagcaaaacaatgaaaccctacgctga

SEQ ID NO: 3680 - protein, 164 aa, Haemophilus influenzae
MKIESYKTQIVRTKNGSYFGELWVNNKLYQKTSYFANEAIATLRLNKRIENFNAMENTNIPPYQKDAETNQFTATPKKSAVEKEVVSTKPQAPKTEAKPKPTTPRRKPFTPYGLNGYFVDKQGNIRLHLDRKAHAHTIVLNPEMFSMLANMVQATQEQNNETLR

SEQ ID NO: 3681 - DNA, 294 bp, Haemophilus influenzae
atgaaaccctacgctgattactacgctcaactcaatgcggcacaccaacgtaaagtggattggcaagctggctatgaaatcgctttagatgaagtcgccatggaaattgacaatgatttacaacaaggcgaccaaacgcattatcacgaactcacggaaatgctgtgtgataacgataatttctggcttgctattggtagtggtgcaagttatgagccttatagacaagaggcgattaagaaaattgccgagcgtgaattgcacgcaagaatgaatgattatgacccagattaa

SEQ ID NO: 3682 - protein, 97 aa, Haemophilus influenzae
MKPYADYYAQLNAAHQRKVDWQAGYEIALDEVAMEIDNDLQQGDQTHYHELTEMLCDNDNFWLAIGSGASYEPYRQEAIKKIAERELHARMNDYDPD

SEQ ID NO: 3683 - DNA, 744 bp, Haemophilus influenzae
atgagcatttttaacgcagcttgtatggcggcgacactaaatttgccactacaaaatggcttaggctttgcctacatcgtccctttcagaaacaacaaagaaaagaaaaccgaagcgcaattccaaattggttataaaggttttatccaactggcacaacgtagtggtcaatttaaacgcttagtcgcattgcctgtgtacaaaaagcaacttatcaaaaaagatttcatcaatggttttgagttcgactgggagcaagaacccgagcaaaacgaaaacccaatcggctattacgcctattttaaactggtaaacgatttttcagccgaactctatatgagtcacgatgacatcgtcaagcacgctcaacgctacagtcaaacatttaaaaaaggctatggcgtatggcacgataacttcgaggcaatggcattaaaaaccgtaactaagttattgctatcaaaacaagctccactctctgttgaaatgcaacaagccgtattagccgaccaagccgttgtgaaagatgtagaaaatcaagaattcaactacaccgacaatattcaagaggcggaatttttagcggttgttgatgaagccacattcgaacaatgcaaacaaagcattgccaacggcgaaaccaccctacaagaactttgtgatagcggggcttatgagtttagccaagagcagattgcggagttggaggcaattgagaatggaaatgtaccaactcaaagctag

SEQ ID NO: 3684 - protein, 247 aa, Haemophilus influenzae
MSIFNAACMAATLNLPLQNGLGFAYIVPFRNNKEKKTEAQFQIGYKGFIQLAQRSGQFKRLVALPVYKKQLIKKDFINGFEFDWEQEPEQNENPIGYYAYFKLVNDFSAELYMSHDDIVKHAQRYSQTFKKGYGVWHDNFEAMALKTVTKLLLSKQAPLSVEMQQAVLADQAVVKDVENQEFNYTDNIQEAEFLAVVDEATFEQCKQSIANGETTLQELCDSGAYEFSQEQIAELEAIENGNVPTQS

SEQ ID NO: 3685 - DNA, 696 bp, Haemophilus influenzae
atgagtttagccaagagcagattgcggagttggaggcaattgagaatggaaatgtaccaactcaaagctagatgctctggcttggctgatttaatggtaaagcctaaaagcggtaatggaatatctgctacagcaaaaagtgcggtgagaaagatagttaaatatgacctgtttggctatcaagatttcgaaggcaataaatacaccgagaaaggtatcgccctggaggaacaagccattaaattaagcggtcgcaagcgtggtttacctcttaaaaagaacacggaaagacgtgaaaacgattggattacaggcgagtgcgatatttatgtgccaagccgaagattaatcatagacactaaatgttcttgggatattggctcacaccctttttttgctgatgaggcggaagaaaaagcgaaaaaagctgggtatgacgcacaaatgcaaggctatatgtggctatgggattgtagtgaggcgcaaattgattttgttctcctgcctaccccttatgaccaattatcaagctatgacgacccaagccgatacattgacttggttgagcaaatcccccaagaaaaacgtatcaccaccgtcacaattaaacgtgatgagaaaatcatcgagaaaatcaaagagcgagtagaaattgctcaagaatattatcaacaactcatacaggagatgcgctaa

SEQ ID NO: 3686 - protein, 231 aa, Haemophilus influenzae
MSLAKSRLRSWRQLRMEMYQLKARCSGLADLMVKPKSGNGISATAKSAVRKIVKYDLFGYQDFEGNKYTEKGIALEEQAIKLSGRKRGLPLKKNTERRENDWITGECDIYVPSRRLIIDTKCSWDIGSHPFFADEAEEKAKKAGYDAQMQGYMWLWDCSEAQIDFVLLPTPYDQLSSYDDPSRYIDLVEQIPQEKRITTVTIKRDEKIIEKIKERVEIAQEYYQQLIQEMR

SEQ ID NO: 3687 - DNA, 435 bp, Haemophilus influenzae
atggcacgtaataccaacaccgtgatattagtcggtcatttaggcagtgacccagaaatccgccaattccaaaatggcgggcaaattgccacatttaatcttgctatcggcgatgattaccgagataaacaaggcaatacagttaaacgtacgcattggatacctattgtggtgcatggcaattctgctgatgtagcaagacaatatctgcaaaaaggctcaaaaatctgtgtaacagggaaactggtacaggaaagctggcaagaccaaaacggcaataaccgcaccgcacttaaagtagcgacacaatcctttgaaatgctagacagcaaggtaagcaatgaaacgcaacagccaagcaaaaacaaagaaaaacccgatccattaagcgcagcagcagaacaagatgggtttaatgatgatattccgttctga

SEQ ID NO: 3688 - protein, 144 aa, Haemophilus influenzae
MARNTNTVILVGHLGSDPEIRQFQNGGQIATFNLAIGDDYRDKQGNTVKRTHWIPIVVHGNSADVARQYLQKGSKICVTGKLVQESWQDQNGNNRTALKVATQSFEMLDSKVSNETQQPSKNKEKPDPLSAAAEQDGFNDDIPF

SEQ ID NO: 3689 - DNA, 294 bp, Haemophilus influenzae
atgactgaacaattaaaagactttgatgtggcagaacacctcatttctgaagaagaaattcaactttaccttaatgaaattctacaagaagataatattgagcttattttatcctcccttggcgacatagctcgtgcgcgtaacatgagccaaatcgcacgtgatgcagggataagccgagaaggtctttataaagccttatctggcacgggcaatcctacttttgctactgtaatgaaagtaatgaaagccttaaatttacagttccaagttcaacaatctcgattcgcctaa

SEQ ID NO: 3690 - protein, 97 aa, Haemophilus influenzae
MTEQLKDFDVAEHLISEEEIQLYLNEILQEDNIELILSSLGDIARARNMSQIARDAGISREGLYKALSGTGNPTFATVMKVMKALNLQFQVQQSRFA

SEQ ID NO: 3691 - DNA, 93 bp, Haemophilus influenzae
gtgcggtacaaatatctcgttcatttgcttgctgaacgtatagcgccattaaaatttggtattgcagcaaactatcctcgtgaaggttcataa

SEQ ID NO: 3692 - protein, 30 aa, Haemophilus influenzae
MRYKYLVHLLAERIAPLKFGIAANYPREGS

SEQ ID NO: 3693 - DNA, 555 bp, Haemophilus influenzae
atgagcaaacctaaagaaaccaaatgcaaagtctgcggcaaagcgtttgtaaaaacctttagttcgacacagaaagtttgctcgcctgaatgtgcgattaaattagcccgagataatgcgcaaaaagcacaggaacgagcagagaagaaaaagcaaagggaacgtaaggctaaattaaaaagtcgttcagaatggttgaaagagacgcaagcggtatttaataaattcattcgcctgcgagataaaaatgaaccctgtatcagttgcggtcggtatcatcaagggcaataccatgccgggcattatcgcagtgtcggagcctgccctgaattaagattttgtgagctaaacgtacataaacaatgcgccccctgtaatgatcacaagagcggaaacatcatcgaatatcgaattaatctcgtcaataaaatcggtgcggataaggtagcttggttagaacggcaagaccacgaaccgaagaaatacaccattgaagattgtaaggcgattattaagcattacaaggcaaaaattaaagagcaggaaggagagtag

SEQ ID NO: 3694 - protein, 184 aa, Haemophilus influenzae
MSKPKETKCKVCGKAFVKTFSSTQKVCSPECAIKLARDNAQKAQERAEKKKQRERKAKLKSRSEWLKETQAVFNKFIRLRDKNEPCISCGRYHQGQYHAGHYRSVGACPELRFCELNVHKQCAPCNDHKSGNIIEYRINLVNKIGADKVAWLERQDHEPKKYTIEDCKAIIKHYKAKIKEQEGE

SEQ ID NO: 3695 - DNA, 204 bp, Haemophilus influenzae
atgagtagcaaagaaaaatttgaacgcactaaaccagtagtgaatactgaaataataggacgcgttgatcacggtaaaaatattatagcggcggcaataacaacagtattagcgaatacagctaaaggagattttgtagcaaccatgccaaaagtaagctatccagcaagtcgcaccaacaagaaagccatttatagagaatag

SEQ ID NO: 3696 - protein, 67 aa, Haemophilus influenzae
MSSKEKFERTKPVVNTEIIGRVDHGKNIIAAAITTVLANTAKGDFVATMPKVSYPASRTNKKAIYRE

SEQ ID NO: 3697 - DNA, 417 bp, Haemophilus influenzae
atgagccaatacaaacctttctttttacgtgatcaacgcattaaaaataattgcttggatttaatcaaagagctgccaacagacgataaaaagccgttggtcgtaaaaatccaaccgataacacgctcacttgagcagaactcaaaacttcacgcactactaagcgatatatcaaaacagtgcgaatttaacggtaaaaagcgagacattgacacttggaagatgattatggtatcggctcacaaaattgcaacaggtggacaggctgaaatggtaatcggattagagggtgaagtaatcaacctacgagaaagtaccgctcaaatgagcgtaaaacgattagcaagccttatcgaatatgttcaagcgtgggcagcagaaaacgatgtaattcttagtgatggttggaggcactaa

SEQ ID NO: 3698 - protein, 138 aa, Haemophilus influenzae
MSQYKPFFLRDQRIKNNCLDLIKELPTDDKKPLVVKIQPITRSLEQNSKLHALLSDISKQCEFNGKKRDIDTWKMIMVSAHKIATGGQAEMVIGLEGEVINLRESTAQMSVKRLASLIEYVQAWAAENDVILSDGWRH

SEQ ID NO: 3699 - DNA, 627 bp, Haemophilus influenzae
gtgaaccaattaactaatcaatcattgcaccaaggtgtatcaccacaagtggagaaatttattgatacgttgttcgaccaactttgcgctagttgccctcagttgcttaaccttaccccagagcgattgcaggtagtaaaacgccagtggattttaggctttgctgaaaatggaattacaaaaataacacaagtcaaacgaggtatggcggaaatgcgtgctaagccaaatgggtatttgccaagtgtaggcgaatttattcaagcatgcaaagttctggactaccacgtattgggcttaccgaatgaagcggaattataccaacgttataacactttcttaggctatgcccgattcaatcgggatgaatttcaatatcgttcaaaagtggaattttggttgcttaaaaatctgtacgaaaagtgcaagaaaaaatcggaagaggacacgttgaaagctattccgaaattactcacaaaagcggcagaaaaagtgcggtcgaattttccttttgagggtattccgaaaatgattccaacaaagccacgtttttacgataaagcgaaggctgataaggcgcgcgatagcttgatggcaatgatgaaagggaaaggggcattgcaatga

SEQ ID NO: 3700 - protein, 208 aa, Haemophilus influenzae
MNQLTNQSLHQGVSPQVEKFIDTLFDQLCASCPQLLNLTPERLQVVKRQWILGFAENGITKITQVKRGMAEMRAKPNGYLPSVGEFIQACKVLDYHVLGLPNEAELYQRYNTFLGYARFNRDEFQYRSKVEFWLLKNLYEKCKKKSEEDTLKAIPKLLTKAAEKVRSNFPFEGIPKMIPTKPRFYDKAKADKARDSLMAMMKGKGALQ

SEQ ID NO: 3701 - DNA, 723 bp, Haemophilus influenzae
atgagtatgcgattaatggttcaagcaatgaattgtaaggttggcaatcctgctagaaaacttgtgcttttaaaactagctgataatgccaatgatgatggaatttgttttcctagttatcaatacattgccgataaatgcgaaatgtcaaaacgtagcgcgattagtcacattgatgatttaatcaaaatgggattggtcaccaaaaaagcgcgaaaaaataaagatggttcaagtgcaaatttatatcttttacaccttgagcagggtagtgaaaaatctgcactagggggtgaaaatatttcactaggtagtgaaaaatttgcactagggggtagtgaaaaatttgcacccataaccagtcactctttagaaccagtcaatgaacctaaaaaaactacgcaaaaaagcgaatctgaaattttgcttgagcggtttggcataacaggacagcttgctaaagattttattacgcatcgtaaaaccaagcgaggggcaattagcgaaacgcaacttagccgtttgcaaaaacaagcggacaaagcaggaatttcgatttgtgaagtggtggagatttgcatcgaacgcaattggcagggatttaacgcatcttgggattggcgtgatgagaagctgcgaacatcccaagcacaaaaaatgagttttgaagaaaaaaatgcgttgccgtggaatcgtcctgaagactgggagaatgtactgtga

SEQ ID NO: 3702 - protein, 240 aa, Haemophilus influenzae
MSMRLMVQAMNCKVGNPARKLVLLKLADNANDDGICFPSYQYIADKCEMSKRSAISHIDDLIKMGLVTKKARKNKDGSSANLYLLHLEQGSEKSALGGENISLGSEKFALGGSEKFAPITSHSLEPVNEPKKTTQKSESEILLERFGITGQLAKDFITHRKTKRGAISETQLSRLQKQADKAGISICEVVEICIERNWQGFNASWDWRDEKLRTSQAQKMSFEEKNALPWNRPEDWENVL

SEQ ID NO: 3703 - DNA, 696 bp, Haemophilus influenzae
gtgatcaacaaaagcgactttaggcgcattacgctcttattaacgattacgaaagaaaacgcaagtattttgacgatgagtagtcgggaaattgcggagattacacataaagaacacaaaaatgtattacgtgttattcgtgatttgattgaacaaaatttagtcgctcaaattgagccactaaaatttgagtatagaaatcaatggtttgattactatgagttaaacaagcgggatacgtttgttgttgtcgctcgcttatcgcctgaatttaccgccgcagtggtcgatcgctggcaagcgttggaaaatcgacaaaaaccaaccgcacttattccgcaatctttttctgaggcattgatgttagccgctcagttacaagcagaaaaagagcgtaatgcgcctaaagtcgcttttgttgatcactatgtggaagtggggacgagtaaatcatttcgtgagacggcgaagattttgaaaatacctgagcgtgcattggtcaatcgcttggtggaagataaatatttgtatcgtcaatcgggcgtgcttttgccttatcaatcggcacacacgaaagatctttttacggttaaaacaggtactgctgaacacggtcacaattacactcagacgcgtgtaacaagcaaaggcattgaatttatcgcgtcacgttatgcttcggagttgatgctatga

SEQ ID NO: 3704 - protein, 231 aa, Haemophilus influenzae
MINKSDFRRITLLLTITKENASILTMSSREIAEITHKEHKNVLRVIRDLIEQNLVAQIEPLKFEYRNQWFDYYELNKRDTFVVVARLSPEFTAAVVDRWQALENRQKPTALIPQSFSEALMLAAQLQAEKERNAPKVAFVDHYVEVGTSKSFRETAKILKIPERALVNRLVEDKYLYRQSGVLLPYQSAHTKDLFTVKTGTAEHGHNYTQTRVTSKGIEFIASRYASELML

SEQ ID NO: 3705 - DNA, 261 bp, Haemophilus influenzae
gtggggacgagtaaatcatttcgtgagacggcgaagattttgaaaatacctgagcgtgcattggtcaatcgcttggtggaagataaatatttgtatcgtcaatcgggcgtgcttttgccttatcaatcggcacacacgaaagatctttttacggttaaaacaggtactgctgaacacggtcacaattacactcagacgcgtgtaacaagcaaaggcattgaatttatcgcgtcacgttatgcttcggagttgatgctatga

SEQ ID NO: 3706 - protein, 86 aa, Haemophilus influenzae
MGTSKSFRETAKILKIPERALVNRLVEDKYLYRQSGVLLPYQSAHTKDLFTVKTGTAEHGHNYTQTRVTSKGIEFIASRYASELML

(The sequence listing continues in the following parts.)
